(19) United States
(12) Patent Application Publication
(10) Pub. No.: US 2023/0159913 A1
(43) Pub. Date: May 25, 2023

(54) TARGETED BASE EDITING OF THE USH2A GENE

(71) Applicants: The Broad Institute, Inc., Cambridge, MA (US); President and Fellows of Harvard College, Cambridge, MA (US); Massachusetts Eye and Ear Infirmary, Boston, MA (US)

(72) Inventors: David R. Liu, Cambridge, MA (US); Jonathan Ma Levy, Cambridge, MA (US); Wei Hsi Yeh, Cambridge, MA (US); Jason Comander, Boston, MA (US); Yuki Tachida, Boston, MA (US); Eric A. Pierce, Boston, MA (US); Qin Liu, Boston, MA (US); Nachiket Pendse, Boston, MA (US)

(73) Assignees: The Broad Institute, Inc., Cambridge, MA (US); President and Fellows of Harvard College, Cambridge, MA (US); Massachusetts Eye and Ear Infirmary, Boston, MA (US)

(21) Appl. No.: 17/921,971

(22) PCT Filed: Apr. 27, 2021
(86) PCT No.: PCT/US2021/029488

§ 371 Date: Oct. 27, 2022

Related U.S. Application Data
(60) Provisional application No. 63/016,929, filed on Apr. 28, 2020.

(51) Int. Cl. C12N 15/10; C12N 15/113; C12N 9/78

(52) U.S. Cl. CPC C12N 15/102; C12N 15/113; C12N 9/78; C12N 2310/20; C12Y 305/04004; C12Y 305/04005

(57) ABSTRACT

The disclosure provides methods of deaminating adenosine and cytosine bases in a target nucleic acid sequence in an USH2A gene comprising contacting the USH2A gene with a base editor in association with a guide RNA (gRNA). In some aspects, base editing is used to restore US2HA function by disrupting a splice site in the USH2A gene sequence to induce skipping of an exon containing a mutation, while in other embodiments, base editing is used to restore US2HA function by correcting a point mutation e.g., in an exon) so as to correct mutations. The disclosure also provides complexes of adenosine base editors and guide RNAs, and complexes of cytidine base editors and guide RNAs. The disclosure further provides pharmaceutical compositions and cells comprising these complexes. The disclosure also provides vectors encoding these complexes, base editors, and gRNAs. In some embodiments, the methods and compositions provided herein are used to treat Usher syndrome and autosomal recessive retinitis pigmentosa (arRP).

### RELATED APPLICATIONS

[0001] This application claims priority under 35 U.S.C. § 119(e) to U.S. Provisional Application, U.S. Ser. No. 63/016,929, filed Apr. 28, 2020, which is incorporated herein by reference.

### BACKGROUND OF THE INVENTION

[0002] The USH2A gene encodes the transmembrane protein Usherin. Usherin localizes mainly at the periciliary region of mammalian photoreceptors and at the stereocilia or hair bundle of the inner ear hair cells (see, Maerker et al. Hum Mol Genet 2008:17(1):71-86; Liu et al., Proc Natl Acad Sci USA. 2007; 104(11):4413-8). The Usherin protein has a large extracellular domain that is proposed to interact with basement membrane collagen IV and fibronectin via laminin domains (see Maerker et al., 2008: Remers et al. Hum Mol Genet. 2003; 14(24):3933-43). Usherin also interacts with other proteins of the USH1 and USH2 complex to form Usher networks (Hum Mol Genet, 26, 1157-1172).

[0003] Mutations in USH2A are the most common cause of both Usher syndrome type II and autosomal recessive retinitis pigmentosa (arRP), accounting for approximately 17% of the recessive RP cases. The impairment of both vision and hearing in Usher syndrome results in a reduced ability of the individual to perceive, communicate, and extract vital information from the environment. Longitudinal regression analysis has showed that the disease course for patients with USH2A mutations can be rapidly progressive, particularly with respect to losing visual field and mobility.

[0004] While USH2A-targeted therapies have been developed and shown to have efficacy in preclinical models in vitro and in vivo, such therapies by their nature are not curative and may require repeat dosing to remain effective. Alternative genetic approaches to targeting USH2A that are more curative in nature are highly desired and would significantly advance the art.

### SUMMARY OF THE INVENTION

[0005] Provided herein are methods, complexes, vectors, compositions, and kits for modifying a polynucleotide (e.g., genomic DNA) using a complex comprising a fusion protein comprising a deaminase (e.g., cytidine deaminase or adenosine deaminase) and a nucleic acid programmable DNA binding protein (“napDNAbp”), and a guide RNA, to treat Usher syndrome. Usher syndrome patients present with congenital, bilateral sensorineural hearing loss; progressive, bilateral, night blindness; or constricted visual fields (tunnel vision). Nearly 80% of Usher syndrome cases are associated with the USH2A gene, which encodes the Usherin protein. Usherin is part of Usher protein complex II that is present in photoreceptor cells of the retina and hair cells of the inner ear. Usher syndrome has autosomal recessive heredity.

[0006] In some aspects, the present disclosure provides methods of base editing the USH2A gene locus using a base editor that comprises a napDNAbp domain and one or more deaminase domains (e.g., a cytidine or adenosine deaminase), which when complexed with a suitable guide RNA, are effective in treating Usher syndrome (e.g., Usher syndrome, type 2A) by installing one or more edits (e.g., insertion, deletion, or replacement of one or more nucleobases) in the USH2A gene locus. In some embodiments, the one or more nucleobase edits installed in the USH2A gene locus result in a modified USH2A gene product having increased stability, activity, and/or production relative to a non-mutated Usherin protein. In various embodiments, the genome editing strategies disclosed herein can be implemented to target the editing of specific nucleobase positions in the USH2A gene locus, which when edited, impart the modified USH2A gene product with increased stability, activity, and/or production.

[0007] In some embodiments, deaminating an adenosine nucleobase in the USH2A gene ameliorates one or more symptoms of Usher syndrome, such as partially or completely reversing visual loss and/or hearing loss. In other embodiments, deaminating a cytosine nucleobase in the USH2A gene ameliorates one or more symptoms of Usher syndrome, such as partially or completely reversing visual loss and/or hearing loss. In some embodiments, the step of contacting, or deaminating of an adenosine nucleobase in the USH2A gene, partially or completely restores auditory function, e.g., by restoring ciliogenesis. In some embodiments, deaminating a cytosine nucleobase in the USH2A gene partially or completely restores auditory function, e.g., by restoring ciliogenesis.

[0008] Despite the success of pre-clinical and clinical studies of AAV-mediated gene augmentation therapy for multiple genetic types of inherited retinal degeneration, developing gene therapies for USH2A-associated retinitis pigmentosa has been challenging because the large size of the USH2A coding sequence (15602 base pairs (bp), coding for 5202 amino acids), far exceeds the packaging capacity of commonly used AAV viral delivery vectors. The present disclosure overcome these translational barriers by using a CRISPR/Cas base editing approach for USH2A-associated diseases, such as autosomal recessive retinitis pigmentosa. CRISPR/Cas systems are capable of maintaining the edited gene under its endogenous regulatory elements by directly altering the genomic USH2A loci, thereby avoiding ectopic expression and abnormal gene production that may occur with conventional viral-mediated gene augmentation therapies.

[0009] To e nable the direct installation or correction of point mutations in living cells, engineered proteins that directly convert a target base pair to a different base pair without creating double-stranded DNA breaks, known as base editors, have recently been developed. The base editors useful in the present disclosure include cytidine base editors and adenine base editors, which are fusion proteins containing a cytosine deaminase or adenosine deaminase, respectively. Cytosine base editors (CBEs), such as BE4max, catalyze the conversion of target CG base pairs to T⋅A, while adenine base editors (ABEs), such as ABEmax (also referred to herein as ABE 7.10), convert target A⋅T base pairs to G⋅C. Base editing with canonical base editors requires the presence of a PAM located approximately 15 base pairs from the target nucleotide(s). Each programmable DNA-binding protein domain recognizes a different PAM sequence. Only about one quarter of pathogenic transition point mutations have a suitably located canonical PAM “NGG” sequence that is compatible with S. pyogenes Cas9-derived base editors. Cytidine deaminases have proven to be broadly compatible with many Cas homologs including SaCas9, SaCas9-KKH, Cas12a (Cpf1), SpCas9-NG, and circularly permuted CP-Cas9s, greatly expanding their targeting scope. Existing adenosine deaminases have unfortunately shown limited compatibility with Cas homologs. Some Cas homologs, such as SaCas9, SaCas9-KKH, SpCas9-NG, and CP-Cas9, are compatible with ABEs, but editing efficiencies are substantially lower than those of the corresponding CBEs. Reference is made to Komor, A.C. et al., Improved base excision repair inhibition and bacteriophage Mu Gam protein yields C:G-to-T:A base editors with higher efficiency and product purity, Sci Adv 3 (2017); Rees, H.A. et al., Improving the DNA specificity and applicability of base editing through protein engineering and protein delivery, Nat. Commun. 8, 15790 (2017); U.S. Patent Application Publication No. 2018/0073012, published Mar. 15, 2018; U.S. Patent Application Publication No. 2017/0121693, published May 4, 2017; International Publication No. WO 2017/070633, published Apr. 27, 2017; and U.S. Patent Publication No. 2015/0166980, published Jun. 18, 2015, U.S. Pat. No. 9,840,699, issued Dec. 12, 2017; and U.S. Pat. No. 10,077,453, issued Sep. 18, 2018, each of which is incorporated herein by reference.

[0010] In certain embodiments, the presently disclosed systems, compositions, kits, uses, and methods make use of base editors BE4max, BE4max-VRQR, BE4-SaKKH, ABE7.10, ABE8e, ABE8e(V106W), ABE8-NG, ABE8-VQR, and ABE-xCas9 to install targeted edits in the USH2A gene. In certain embodiments, the presently disclosed systems, compositions, kits, uses, and methods make use of these base editors to install targeted edits in the USH2A gene with low frequency of off-target effects.

[0011] Accordingly, aspects of the disclosure provide methods and compositions for deaminating an adenine nucleobase (A) in an USH2A gene using a complex of an adenine base editor (ABE) bound to a guide RNA (gRNA), wherein the gRNA comprises a guide sequence that is complementary to a target nucleic acid sequence in the USH2A gene.

[0012] Other aspects of the disclosure provide methods and compositions for deaminating a cytosine nucleobase (C) in an USH2A gene using a complex of a cytidine base editor (CBE) bound to a guide RNA (gRNA), wherein the gRNA comprises a guide sequence that is complementary to a target nucleic acid sequence in the USH2A gene.

[0013] In some embodiments, the disclosure provides complexes comprising a base editor (e.g., adenine base editor) and a guide RNA (gRNA). In some embodiments, the gRNA directs the base editor in proximity to a base in the USH2A gene, for example, a splice acceptor site (SAS) or a splice donor site (SDS) in exon 13. In some embodiments, the gRNA directs the base editor within 1, 2, 3, 4, 5, 6, 7, 8, 9, 10, 11, 12, 13, 14, 15, 16, 17, 18, 19, or 20 base pairs of a SAS or an SDS within the USH2A gene. In other embodiments, the gRNA directs the base editor within 1, 2, 3, 4, 5, 6, 7, 8, 9, 10, 11, 12, 13, 14, 15, 16, 17, 18, 19, or 20 base pairs of a point mutation within the USH2A gene. In some embodiments, the guide RNA comprises a nucleic acid sequence selected from the group of guide sequences (spacers) consisting of: 5′-CUCUUACCUUGGGAAAGGAG-3′ (SEQ ID NO: 199), 5′-UUCCUUCCCGCAUCAGGGAA-3′ (SEQ ID NO: 200), 5′-GUAGUCAUUAACACAAACUC-3′ (SEQ ID NO: 209), 5′-UUCAAAAGCUGGCCUUAAUG-3′ (SEQ ID NO: 215), 5′-AGACCUCAUGACUCAGUCAA-3′ (SEQ ID NO: 216), 5′-GCUUUAGGGCUUAGGUGUGAU-3′ (SEQ ID NO: 36), 5′-GGAGCUAAAUUACAAUGAAG-3′ (SEQ ID NO: 37), and 5′-CCAUUCAUGCAGGCUACAAG-3′ (SEQ ID NO: 217). Exemplary guide sequences to target USH2A may comprise any of the guide sequences set forth as SEQ ID NOs: 36, 37, and 199-232 and 329. In some embodiments, the gRNA comprises a protospacer sequence that comprises any of the nucleic acid sequences as set forth in SEQ ID NOs: 1-35. The protospacer sequence has the same nucleotide sequence as the spacer sequence of the guide RNA, except the spacer sequence comprises ribonucleotides (e.g., uracils), and the protospacer sequence comprises deoxyribonucleotides (e.g., thymines).

[0014] For example, in some embodiments base editing is used to restore US2HA function by disrupting a splice site (or pseudo-splice site) in the USH2A gene sequence to induce skipping of an exon containing a mutation (or a pseudo-exon). This approach is referred to herein as the “exon-skipping approach.” In other embodiments, base editing is used to restore US2HA function by correcting a point mutation (e.g., in an exon) so as to eliminate or reduce mutations. This approach is referred to herein as the “mutation correction approach.”

[0015] Further provided herein are compositions and cells comprising complexes of a base editor and a guide RNA. In some embodiments, the napDNAbp domain comprises a Cas9 protein, such as SpCas9, or an ortholog, homolog, or variant thereof (e.g., an SpCas9 nickase), which when complexed with a suitable guide RNA is effective in treating conditions associated with a mutation in the USH2A gene by installing one or more edits (e.g., insertion, deletion, or replacement of one or more nucleobases) in the USH2A genomic locus. Further provided are base-editor-gRNA complexes, and compositions thereof, for use in the preparation of a medicament and for use in treating a subject having or a subject suspected of having Usher syndrome or retinitis pigmentosa (e.g., autosomal recessive RP).

[0016] The present disclosure relates in part to the discovery that a variety of base editing strategies to target USH2A genomic loci restores functional Usherin protein, for instance by restoring the normal reading frame of a mutated USH2A gene. Mutations have been observed in USH2A that result in a premature stop codon that results in a truncated USH2A translation product. Mutations in exon 13 account for approximately 35% of all USH2A cases, including a single base deletion at position 2299 (c.2299delG), the most common mutation in USH2A. This mutation creates a frameshift in the coding sequence, resulting in a premature stop codon in exon 13. This premature stop codon is predicted to lead to a null or a truncated, non-functional Usherin protein that causes defective stereocilia formation (ciliogenesis).

[0017] The present disclosure further provides vectors, e.g., vectors comprising one or more polynucleotides, encoding a base editor and a guide RNA, or both. In some embodiments, the vectors are recombinant adeno-associated virus (rAAV) vectors. In some embodiments, the vectors are plasmids. rAAV vectors are an efficient and widely used delivery agent that remains the only FDA-approved in vivo gene therapy vector. Further provided herein are kits comprising one or more of these vectors (e.g., rAAV vectors).

[0018] In some embodiments involving an adenosine base editor, the step of contacting a target nucleic acid with a base editor results in the deamination of a adenosine nucleobase in the USH2A gene, which results in a T:A base pair in the USH2A gene being converted to a C:G base pair in the USH2A gene (a transition substitution of an “A” to a “G”). In some embodiments, the step of contacting results in deamination of the adenosine nucleobase in the USH2A gene that induces exon skipping which restores (partially or completely) functional Usherin protein. In some embodiments, deaminating the adenosine nucleobase in the USH2A gene corrects a missense mutation or a nonsense mutation that restores functional Usherin protein.

[0019] In other embodiments involving a cytidine base editor, the step of contacting a target nucleic acid with a base editor results in the deamination of a cytidine nucleobase in the USH2A gene, which results in a C:G base pair in the USH2A gene being substituted with a T:A base pair in the USH2A gene (a transition substitution of a “C” with a “T”). In some embodiments, the step of contacting results in the deamination of a cytidine nucleobase in the USH2A gene which induces exon skipping that restores (partially or completely) functional Usherin protein. In some embodiments, deaminating the cytidine nucleobase in the USH2A gene corrects a missense mutation or a nonsense mutation that restores functional Usherin protein.

[0020] The complexes, polynucleotides, vectors, rAAV particles, and compositions of the disclosure may be formulated for delivery to the inner ear or the eye (e.g., the retina) of a subject. In some embodiments, the subject is diagnosed with, or is suffering from, a disease associated with a deficiency in functional Usherin protein expression. In some embodiments, the subject is diagnosed with, or is suffering from, Usher Syndrome. Accordingly, provided herein are methods of treatment comprising administering one or more of the disclosed polynucleotides, complexes, vectors, rAAV particles, and compositions to a subject, e.g., a human subject suffering from Usher Syndrome. In some embodiments, the subject is diagnosed with, or is suffering from, retinitis pigmentosa (RP). Accordingly, provided herein are methods of treatment comprising administering one or more of the disclosed polynucleotides, complexes, vectors, rAAV particles, and compositions to a subject, e.g., a human subject suffering from RP.

[0021] It should be appreciated that the foregoing concepts, and additional concepts discussed below, may be arranged in any suitable combination, as the present disclosure is not limited in this respect. Further, other advantages and novel features of the present disclosure will become apparent from the following detailed description of various non-limiting embodiments when considered in conjunction with the accompanying Figures.

### BRIEF DESCRIPTION OF THE DRAWINGS

[0022] The following Figures form part of the present specification and are included to further demonstrate certain aspects of the present disclosure, which can be better understood by reference to one or more of these drawings in combination with the detailed description of specific embodiments presented herein.

[0023] FIGS. 1A-1C are schematics that show the common mutations in the USH2A gene. FIG. lA shows the protein domains, in-frame and out-of-frame mutations in exons in the USH2A gene. FIG. 1B shows the unique mutations in each of 25 in-frame exons reported on LOVD (Leiden Open Variation Database), a database of DNA variants indicated as dots labeled with a letter from A to D. FIG. 1C shows the percentage of mutation frequency in each of the 71 exons of the USH2A gene. Mutations in the exon 13 accounts for 31.25% of all Usher syndrome cases.

[0024] FIG. 2 is a schematic showing how USH2A mutation candidates are narrowed for base editing treatment. The number of USH2A mutations reported in LOVD is more than 1000. USH2A mutations having an appropriate neighboring PAM sequence for base editors of interest were selected. The editing window was set from position 2 to 13 to select for variants that could be edited in ABE or CBE. The base editor efficacy was tested on twenty-four C:G to T:A mutations (ABEs) and eleven G:C to A:T mutations (CBEs) in USH2A. These mutations are referred to in the drawings and herein as nucleotide sites A1-A24 and C1-C11, respectively.

[0025] FIGS. 3A-3B are charts that shows exemplary DNA changes and amino acid substitutions in the USH2A protein that the presently disclosed cytidine base editing methods (at nucleotide sites C1-C11) and adenine base editing methods (at nucleotide sites A1-A24) are designed to correct, along with the pathogenicities associated with these DNA changes. (SEQ ID NOs: 183-193 in FIG. 3A; and SEQ ID NOs: 233-256 in FIG. 3B)

[0026] FIGS. 4A-4B are schematics that illustrate show the protocol for the HEK293 knockout experiments. Stable HEK293 cell lines containing the safe harbor transgene were made by using AAVS1-CRISPR system, as shown in FIG. 4A (SEQ ID NO: 1). The target C base is indicated with an asterisk. The base editor (BE) vector and guide RNA (sgRNA) vectors were transfected into the cells and editing efficacy was confirmed by Sanger sequencing, as shown in FIG. 4B.

[0027] FIGS. 5A-5C show the base editing efficiency of CBEs on Dnrntl target bases in an AAVS1 stable cell line and mouse retina in vivo. FIG. 5A shows the target DNA sequence (SEQ ID NO: 64). The target C base is indicated with an asterisk. FIG. 5B shows the Sanger sequencing data and indicates that cytosines (C) (indicated with a caret) were converted to thymines (T) in nucleotide site C2, which is at nucleotide position 1841 of the USH2A gene (SEQ ID NOS: 65 (top) and 66 (bottom)). The area was calculated by EditR, a publicly accessible algorithm for predicting potential editing in a guide RNA region from a single Sanger sequencing run. FIG. 5C shows the quantification of values of Sanger sequencing data.

[0028] FIGS. 6A-6B show the base editing efficiency in a transfected stable HEK293 cell line. In FIG. 6A, the editing efficiency using CBE (% of conversion) is shown for the 11 CBE target sites. In FIG. 6B, the editing efficiency (% of editing) using ABE7.10 or ABE8 is shown for 24 ABE target sites.

[0029] FIGS. 7A-7B show the indel ratio (%) in transfected HEK293 cells. In FIG. 7A, the indel ratio using CBE is shown for 12 different target sites. In FIG. 7B, the indel ratio using ABE7.10 or ABE8 is shown for 24 different target sites.

[0030] FIGS. 8A-8C show the confirmation of off-target sequences for nucleotide site C6 which is at nucleotide position 9799 of the USH2A gene. Off-target sites were predicted by CRISPOR, a public software that helps design, evaluate, and clone guide sequences for a CRISPR/Cas9 system. Primers were generated for all off-target sequences, and DNA including target sequence was amplified and analyzed by Sanger sequencing, as shown in the blot of FIG. 8C. This graph shows that targeted editing at C6-OT-3 is fairly efficient, and off-target editing frequency at this site is low. (SEQ ID NOs: 67-73, 194-197 in FIG. 8A).

[0031] FIGS. 9A-9C show the confirmation of off-target sequences for nucleotide site A1 (see FIG. 3B). The fourth column indicates the sequence variant nomenclature of the Human Genome Variation Society (HGVS) for each evaluated locus. Off-target sites were predicted by CRISPOR. FIG. 9B shows ABE7.10 and ABE8 data. ABE7.10 edits only OT-5 and ABE8 shows high-efficiency editing. (SEQ ID NOs: 257-266in FIG. 9A). Primers were generated for all off-target sequences, and DNA including target sequence was amplified and analyzed by Sanger sequencing, as shown in the blot of FIG. 9C. The sample lane labels refer to the HGVS labels in FIGS. 9A and 9B as follows: A1-OT2, NC_000002.12G.53254147T>C; A1-OT3, NC_000011.9(0PCM Lv001): c.61+255482A>G; A1-OT4, NC_000001.11(LOC105376673v001): n.138T>C; A1-OT6, NC_000010.11(ATRN L1_v001): n.*599259A>G; A1-OT7, NC_000005. 9: g.124245586T>C; A1-OT9, NC_000021.9(NCAM2_v001): c.55+89989T>C; A1-OT10, NC_000011.91SOX6_v001): c.1251+1418T>C; A1-OT11, NC_000007.13(CDK14_v001): c.*29-38778A>G; A1-OT5, NC_000005.9: g.160332230T>C; AND A1-OT8, NC_000002.12 :g.80229784A>G.

[0032] FIGS. 10A-10H show BE-mediated exon skipping of mouse Ush2a exon 12. FIG. 10A is a schematic showing the potential target sites of base editors at splice acceptor site (SAS) and splice donor site (SDS). FIG. 10B shows CBE and ABE base editor and guide sequences (protospacer sequences set forth as SEQ ID NOs: 267-268, respectively) targeting exon 12 SAS and SDS sites. The target base is indicated with an asterisk. Base editing efficiency at the target sites in mouse immortalized organ of Corti k1 (OC-k1) cells and retina. FIG. 10C shows mouse OC-k1 cell and mouse retina transfected with plasmids carrying ABE-xCas9 in one plasmid and EGFP and U6-guides in another plasmid. GFP positive cells (indicated with an arrow) were FACS sorted and used for genomic DNA and RNA. FIG. 10D shows the base correction rate of base editors in OC-k1 cells and mouse retina for the BE4max, ABE7.10, and ABE8e (“ABE8.0”) editors in OC-k1 cells and mouse retina in vivo. FIG. 10E shows the results of Sanger sequencing (SEQ ID NO: 97) and analysis with Edit-R of the PCR-amplified products of DNA isolated from GFP+cells. Primers flanking target site were used. FIG. 1OF shows RT-PCR products of RNA isolated from GFP+OC-k1 cell and mouse retina. Primers flanking mouse exon 11 and 13 were used in the PCR analysis. A ˜290bp band was detected in all editing cells, which matches the expected size if exon 12 is skipped from the transcripts. FIG. 10G shows the results of Sanger sequencing and analysis with Edit-R of of these RT-PCR products, which shows that exon 13 is skipped in frame (SEQ ID NO: 96). FIG. 10H shows the sgRNA sequences of CBE and ABE editors for targeting the splicing acceptor sites of in-frame exons of the USH2A gene (top). These guide sequences are set forth as SEQ ID NOs: 559-568 (from top to bottom). The conversion rates for 10 tested sgRNAs ranges from 20-35% (bottom).

[0033] FIG. 11 shows that exon skipping of mouse Ush2a exons in OC-K1 cells results in functional protein. Restoration of ciliogenesis in Ush2a null cells by full length or exon-skipped USH2A protein. Immunostaining of Ush2a (*) and acetylated alpha tubulin (\hat{ }) in wild type, un-transfected Ush2a null cells (clone J) and transfected clone J with mouse full length (Ush2a-FL), human full length (USH2A-FL), and human exon 13, 17, 24, 28, 43, 45, 50, 54, 55, 56, and 62 deleted (USH2A-AEx13, ΔEx17, ΔEx24, ΔEx28, ΔEx43, ΔEx45, AEx50, ΔEx54-55, ΔEx56 and ΔEx62) USH2A cDNA expression plasmids, respectively. Expression of Ush2a and primary cilia marked acetylated alpha tubulin were observed in transfected knockout cells (clone J) cells transfected with ΔEx13, ΔEx17, ΔEx24, ΔEx43, ΔEx45, ΔEx50, and ΔEx56 USH2A cDNA plasmids. No USH2A immunostaining was detected in cells transfected with ΔEx28, ΔEx62, or the negative control ΔEx54-55. Arrows indicate colocalization of Ush2a and alpha tubulin signals. Statistical analysis of the ciliary length in transfected null OC-k1 (clone J) cells from experimental duplicates showed significant differences between non-transfected and transfected Ush2a null cells with 7 USH2A cDNA plasmids. ND: no difference. Each data point represents the cilia length of individual cells (n=100).

[0034] FIGS. 12A-12H show the optimization and validation of evaluation systems. FIG. 12A is a schematic that illustrates the protocol for the AAVS1 in vitro knockout in HEK293 cells. FIGS. 12B and 12C are scatter plots that show a comparison of the methods using stable cell lines (pooled cells and single clone), where FIG. 12B shows expression of transgene 1 (TG1) and FIG. 12C shows expression of transgene 2 (TG 2). These plots have been fitted with a line of regression, with the equation shown. A transient expression study was performed by transfecting the same vector including TG1 or TG2 and base editor (BE) vector and sgRNA vector. In parallel, a pooled cell and single clone study was performed by transfecting these cells with BE and sgRNA vectors. FIG. 12D is a scatterplot that shows the comparison of the editing efficiency between the transient expression study and stable single clone study. FIG. 12E is a scatterplot that shows the comparison of editing efficiency between the Sanger analysis and Amplicon sequencing analysis.

[0035] FIGS. 13A-13C show the evaluation of the efficacy of base editors on USH2A mutations. (SEQ ID NOS: 269-277 as listed in FIG. 13A; SEQ ID NOs: 393-401, 403 in FIG. 13B; and SEQ ID NOs: 404-409 in FIG.13C).

[0036] FIG. 14A is a schematic that illustrates the off-target editing metric “productive editing” (productive edit %), which is calculated as the mean rate at which the contacting of the target sequence with a base editor results in a product that does not contain an amino acid mutation. Nucleotide site A5, which corresponds to nucleotide position 14803, is shown as an example DNA target. (SEQ ID NOs: 164-169 from top to bottom). FIG. 14B shows the editing efficiency (% target conversion) and productive editing % at each mutation of USH2A for the base editors BE3.9, ABE 7.10, and ABE8e.

[0037] FIGS. 15A-15D show the restoration of protein expression with base editing of full length USH2A plasmids with mutations. FIG. 15A shows a sequencing trace of A1 (c.11864 G>A) protospacer region (SEQ ID NOS: 410-413 from top to bottom). The black arrow shows USH2A mutation site (Al). The established HEK293 mutant had the mutation “A” in all chromosomes and was transfected with ABE7.10 and ABE8. FIG. 15B shows the editing efficiency was quantified by EditR. FIG. 15C shows immunostaining of USH2A in HEK293 two days after co-transfection with plasmid vector of full length USH2A WT or mutant (sites A1, A7, A12, A15) and base editor/sgRNA plasmid vector. USH2A full length protein is stained by USH2A Ab that recognized intracellular region (encircled in white) and nuclei are stained with Hoechst 33342 (background shading). Bar; 50 μm. FIG. 15D shows cells positive for USH2A full length protein were counted in 6 fields. Data are indicated as mean ±SD (n=6), * p <0.001, by two-tailed Student's t test.

[0038] FIGS. 16A-16B show editing with split intein editors. FIG. 16A shows sequencing trace of site Al (c.11864 G>A) protospacer region (SEQ ID NOS: 414 (top) and 415)). The black arrow shows USH2A mutation site (A1). The HEK293 cells were transfected with mutant USH2A plasmids, a guide plasmid, and various editor types. FIG. 16B shows the editing efficiency was quantified by EditR, showing similar editing efficiency with 2 split-intein ABE8 editors.

[0039] FIGS. 17A-17B show the editing efficacy of site Al in USH2A using a WT Rhesus monkey. The editing efficacy of site A1 can be estimated by checking the editing efficacy of site A7 in Rhesus monkey sequence because there is no difference in the editing efficacy at sites A3 and A7 between Human mut ABE8 and Rhesus monkey ABE8. (SEQ ID NOs: 416-420 shown from top to bottom in FIG. 17A).

[0040] FIG. 18 shows transgene sequences including tandem USH2A mutation sequence and universal primers. Grey highlighted sections show restriction enzyme site, grey-shaded underlined sections show forward primer sequence, and grey-shaded asterisked sections show reverse primer sequences. (SEQ ID NOs: 421 and 422 shown in FIGS. 18A and 18B respectively).

[0041] FIG. 19 is a scatterplot showing a comparison of the editing efficacy on Dnmt1 sequence in mouse retina and in stable cell line with transgene. The sequence of 20 bases is the protospacer of Dnmt1, and each potential target “C” is marked with a number.

[0042] FIGS. 20A-20B show the editing efficacy of base editor on USH2A mutations by Sanger sequencing. FIG. 20A shows difference in C to T editing efficacy of CBE by three types of Cas9, SpCas9WT (C1, C2, C3, C4, C5 and C6), SpCas9 VQR (C7, C10 and C11) and SaCas9 KKH (C8 and C9). FIG. 20B shows difference in A to G editing efficacy of ABE7.10 and ABE8 by four types of Cas9, SpCas9WT (A1, A5, A15, A18, A20, A22), SpCas9 VQR (A2, A4, A7, A8, A9, A13, A14, A16), SpCas9NG (A11, A12, A17, A19, A21, A23, A24) and SaCas9 KKH (C8 and C9).

[0043] FIGS. 21A-21E show NGS analysis of DNA edited by base editor. FIG. 21A shows difference in productive edit, non-productive edit and indel by three types of base editor. The value is mean of each target mutation (CBE3.9; C1-11, ABE7.10; A1-A24, ABE8; A1-A24). FIG. 21B shows a scatter plot editing efficacy vs indel ratio. Each point represents the value of target mutation (CBE3.9:asterisk symbol (*), ABE7.10:plus-sign symbol (+), ABE8: caret symbol (\hat{ })). FIG. 21C shows comparison between the experimental value of editing efficiency and the percentile value as predicted by BE-Hive. FIG. 21D shows a scatter plot showing correlation between experimental ratio of correct sequence and calculated ratio of correct sequence by BE-Hive. The predicted frequency of correct sequence was calculated by inputting the experimental value of editing efficiency into BE-Hive tool. In FIGS. 21C and 21D, the ABE values are indicated with an asterisk.

[0044] FIG. 22 is a scatterplot showing relation between Mit off-target score and editing ratio at off-target site.

### DEFINITIONS

[0045] As used herein and in the claims, the singular forms “a,” “an,” and “the” include the singular and the plural unless the context clearly indicates otherwise. Thus, for example, a reference to “an agent” includes a single agent and a plurality of such agents.

### AAV

[0046] An “adeno-associated virus” or “AAV” is a virus which infects humans and some other primate species. The wild-type AAV genome is a single-stranded deoxyribonucleic acid (ssDNA), either positive- or negative-sensed. The genome comprises two inverted terminal repeats (ITRs), one at each end of the DNA strand, and two open reading frames (ORFs): rep and cap between the ITRs. The rep ORF comprises four overlapping genes encoding Rep proteins required for the AAV life cycle. The cap ORF comprises overlapping genes encoding capsid proteins: VP1, VP2 and VP3, which interact together to form the viral capsid. VP1, VP2 and VP3 are translated from one mRNA transcript, which can be spliced in two different manners: either a longer or shorter intron can be excised resulting in the formation of two isoforms of mRNAs: a ˜2.3 kb- and a ˜2.6 kb-long mRNA isoform. The capsid forms a supramolecular assembly of approximately 60 individual capsid protein subunits into a non-enveloped, T-1 icosahedral lattice capable of protecting the AAV genome. The mature capsid is composed of VP1, VP2, and VP3 (molecular masses of approximately 87, 73, and 62 kDa respectively) in a ratio of about 1:1:10. rAAV particles may comprise a nucleic acid vector (e.g., a recombinant genome), which may comprise at a minimum: (a) one or more heterologous nucleic acid regions comprising a sequence encoding a protein or polypeptide of interest (e.g., a split Cas9 or split nucleobase) or an RNA of interest (e.g., a gRNA), or one or more nucleic acid regions comprising a sequence encoding a Rep protein; and (b) one or more regions comprising inverted terminal repeat (ITR) sequences (e.g., wild-type ITR sequences or engineered ITR sequences) flanking the one or more nucleic acid regions (e.g., heterologous nucleic acid regions). In some embodiments, the nucleic acid vector is between 4 kb and 5 kb in size (e.g., 4.2 to 4.7 kb in size). In some embodiments, the nucleic acid vector further comprises a region encoding a Rep protein. In some embodiments, the nucleic acid vector is circular. In some embodiments, the nucleic acid vector is single-stranded. In some embodiments, the nucleic acid vector is double-stranded. In some embodiments, a double-stranded nucleic acid vector may be, for example, a self-complimentary vector that contains a region of the nucleic acid vector that is complementary to another region of the nucleic acid vector, initiating the formation of the double-strandedness of the nucleic acid vector.

### Adenosine Deaminase

[0047] As used herein, the term “adenosine deaminase” or “adenosine deaminase domain” refers to a protein or enzyme that catalyzes a deamination reaction of an adenosine (or adenine). The terms are used interchangeably. In certain embodiments, the disclosure provides base editors comprising one or more adenosine deaminase domains. For instance, an adenosine deaminase domain may comprise a heterodimer of a first adenosine deaminase and a second deaminase domain, connected by a linker. Adenosine deaminases (e.g., engineered adenosine deaminases or evolved adenosine deaminases) provided herein may be may be enzymes that convert adenine (A) to inosine (I) in DNA or RNA. Such adenosine deaminase can lead to an A:T to G:C base pair conversion. In some embodiments, the deaminase is a variant of a naturally-occurring deaminase from an organism. In some embodiments, the deaminase does not occur in nature. For example, in some embodiments, the deaminase is at least 50%, at least 55%, at least 60%, at least 65%, at least 70%, at least 75% at least 80%, at least 85%, at least 90%, at least 95%, at least 96%, at least 97%, at least 98%, at least 99%, or at least 99.5% identical to a naturally-occurring deaminase.

[0048] In some embodiments, the adenosine deaminase is derived from a bacterium, such as, E. coli, S. aureus, S. typhi, S. putrefaciens, H. influenzae, or C. crescentus. In some embodiments, the adenosine deaminase is a TadA deaminase. In some embodiments, the TadA deaminase is an E. coli TadA deaminase (ecTadA). In some embodiments, the TadA deaminase is a truncated E. coli TadA deaminase. For example, the truncated ecTadA may be missing one or more N-terminal amino acids relative to a full-length ecTadA. In some embodiments, the truncated ecTadA may be missing 1, 2, 3, 4, 5 ,6, 7, 8, 9, 10, 11, 12, 13, 14, 15, 6, 17, 18, 19, or 20 N-terminal amino acid residues relative to the full length ecTadA. In some embodiments, the truncated ecTadA may be missing 1, 2, 3, 4, 5 ,6, 7, 8, 9, 10, 11, 12, 13, 14, 15, 6, 17, 18, 19, or 20 C-terminal amino acid residues relative to the full length ecTadA. In some embodiments, the ecTadA deaminase does not comprise an N-terminal methionine. Reference is made to U.S. Patent Publication No. 2018/0073012, published Mar. 15, 2018, which is incorporated herein by reference.

### Antisense Strand

[0049] In genetics, the “antisense” strand of a segment within double-stranded DNA is the template strand, and which is considered to run in the 3′ to 5′ orientation. By contrast, the “sense” strand is the segment within double-stranded DNA that runs from 5′ to 3′, and which is complementary to the antisense strand of DNA, or template strand, which runs from 3′ to 5′. In the case of a DNA segment that encodes a protein, the sense strand is the strand of DNA that has the same sequence as the mRNA, which takes the antisense strand as its template during transcription, and eventually undergoes (typically, not always) translation into a protein. The antisense strand is thus responsible for the RNA that is later translated to protein, while the sense strand possesses a nearly identical makeup to that of the mRNA. Note that for each segment of dsDNA, there will possibly be two sets of sense and antisense, depending on which direction one reads (since sense and antisense is relative to perspective). It is ultimately the gene product, or mRNA, that dictates which strand of one segment of dsDNA is referred to as sense or antisense.

### Base Editing

[0050] “Base editing” refers to genome editing technology that involves the conversion of a specific nucleic acid base into another at a targeted genomic locus. In certain embodiments, this can be achieved without requiring double-stranded DNA breaks (DSB), or single stranded breaks (i.e., nicking). To date, other genome editing techniques, including CRISPR-based systems, begin with the introduction of a DSB at a locus of interest. Subsequently, cellular DNA repair enzymes mend the break, commonly resulting in random insertions or deletions (indels) of bases at the site of the DSB. However, when the introduction or correction of a point mutation at a target locus is desired rather than stochastic disruption of the entire gene, these genome editing techniques are unsuitable, as correction rates are low (e.g. typically 0.1% to 5%), with the major genome editing products being indels. In order to increase the efficiency of gene correction without simultaneously introducing random indels, the present inventors previously modified the CRISPR/Cas9 system to directly convert one DNA base into another without DSB formation. See, Komor, A. C., et al., Programmable editing of a target base in genomic DNA without double-stranded DNA cleavage. Nature 533, 420-424 (2016), the entire contents of which is incorporated by reference herein.

### Base Editor

[0051] The term “base editor (BE),” as used herein, refers to an agent comprising a polypeptide that is capable of making a modification to a base (e.g., A, T, C, G, or U) within a nucleic acid sequence (e.g., DNA or RNA) that converts one base to another (e.g., A to G, AtoC,AtoT,CtoT,CtoG,CtoA,GtoA,GtoC,GtoT,TtoA,TtoC,TtoG). In some embodiments, the base editor is capable of deaminating a base within a nucleic acid such as a base within a DNA molecule. In the case of an adenine base editor, the base editor is capable of deaminating an adenine (A) in DNA. Such base editors may include a nucleic acid programmable DNA binding protein (napDNAbp) fused to an adenosine deaminase. Some base editors include CRISPR-mediated fusion proteins that are utilized in the base editing methods described herein. In some embodiments, the base editor comprises a nuclease-inactive Cas9 (dCas9) fused to a deaminase which binds a nucleic acid in a guide RNA-programmed manner via the formation of an R-loop, but does not cleave the nucleic acid. For example, the dCas9 domain of the fusion protein may include a D10A and a H840A mutation (which renders Cas9 capable of cleaving only one strand of a nucleic acid duplex), as described in PCT/US2016/058344, which published as WO 2017/070632 on Apr. 27, 2017 and is incorporated herein by reference in its entirety. The DNA cleavage domain of S. pyogenes Cas9 includes two subdomains, the HNH nuclease subdomain and the RuvC1 subdomain. The HNH subdomain cleaves the strand complementary to the gRNA (the “targeted strand”, or the strand in which editing or deamination occurs), whereas the RuvC1 subdomain cleaves the non-complementary strand containing the PAM sequence (the “non-edited strand”). The RuvC1 mutant DlOA generates a nick in the targeted strand, while the HNH mutant H840A generates a nick on the non-edited strand (see Jinek et al., Science, 337:816-821(2012); Qi et al., Cell. 28;152(5):1173-83 (2013), each of which are incorporated by reference herein).

[0052] In some embodiments, a base editor is a macromolecule or macromolecular complex that results primarily (e.g., more than 80%, more than 85%, more than 90%, more than 95%, more than 99%, more than 99.9%, or 100%) in the conversion of a nucleobase in a polynucleic acid sequence into another nucleobase (i.e., a transition or transversion) using a combination of 1) a nucleotide-, nucleoside-, or nucleobase-modifying enzyme and 2) a nucleic acid binding protein that can be programmed to bind to a specific nucleic acid sequence.

[0053] In some embodiments, the base editor comprises a DNA binding domain (e.g., a programmable DNA binding domain such as a dCas9 or nCas9) that directs it to a target sequence. In some embodiments, the base editor comprises a nucleobase modifying enzyme fused to a programmable DNA binding domain (e.g., a dCas9 or nCas9). A “nucleobase modifying enzyme” is an enzyme that can modify a nucleobase and convert one nucleobase to another (e.g., a deaminase such as a cytidine deaminase or a adenosine deaminase). In some embodiments, the base editor may target cytosine (C) bases in a nucleic acid sequence and convert the C to thymine (T) base. In some embodiments, the C to T editing is carried out by a deaminase, e.g., a cytidine deaminase. Base editors that can carry out other types of base conversions (e.g., adenosine (A) to guanine (G), C to G) are also contemplated.

[0054] Base editors that convert a C to T, in some embodiments, comprise a cytidine deaminase. A “cytidine deaminase” refers to an enzyme that catalyzes the chemical reaction “cytosine+H₂O→uracil+NH₃” or “5-methyl-cytosine+H₂O→thymine+NH₃.” As it may be apparent from the reaction formula, such chemical reactions result in a C to U/T nucleobase change. In the context of a gene, such a nucleotide change, or mutation, may in turn lead to an amino acid change in the protein, which may affect the protein's function, e.g., loss-of-function or gain-of-function. In some embodiments, the C to T base editor comprises a dCas9 or nCas9 fused to a cytidine deaminase. In some embodiments, the cytidine deaminase domain is fused to the N-terminus of the dCas9 or nCas9. In some embodiments, the base editor further comprises a domain that inhibits uracil glycosylase, and/or a nuclear localization signal. Such base editors have been described in the art, e.g., in Rees & Liu, Nat Rev Genet. 2018; 19(12):770-788 and Koblan et al., Nat Biotechnol. 2018; 36(9):843-846; as well as.U.S. Patent Publication No. 2018/0073012, published Mar. 15, 2018, which issued as U.S. Pat. No. 10,113,163; on Oct. 30, 2018; U.S. Patent Publication No. 2017/0121693, published May 4, 2017, which issued as U.S. Pat. No. 10,167,457 on Jan. 1, 2019; International Publication No. WO 2017/070633, published Apr. 27, 2017; U.S. Patent Publication No. 2015/0166980, published Jun. 18, 2015; U.S. Pat. No. 9,840,699, issued Dec. 12, 2017; U.S. Pat. No. 10,077,453, issued Sep. 18, 2018; International Publication No. WO 2019/023680, published Jan. 31, 2019; International Application No. PCT/US2019/033848, filed May 23, 2019, which published as Publication No. WO 2019/226593 on Nov. 28, 2019; International Publication No. WO 2018/0176009, published Sep. 27, 2018, International Publication No. WO 2020/041751, published Feb. 27, 2020; International Publication No. WO 2020/051360, published Mar. 12, 2020; International Patent Publication No. WO 2020/102659, published May 22, 2020; International Publication No. WO 2020/086908, published Apr. 30, 2020; International Publication No. WO 2020/181180, published Sep. 10, 2020; International Publication No. WO 2020/214842, published Oct. 22, 2020; International Publication No. WO 2020/092453, published May 7, 2020; International Publication No. WO2020/236982, published Nov. 26, 2020; International Application No. PCT/US2020/624628, filed Nov. 25, 2020, and International Application No. PCT/US2021/016827, filed Feb. 5, 2021, the contents of each of which are incorporated herein by reference in their entireties.

[0055] In some embodiments, a base editor converts an A to G. In some embodiments, the base editor comprises an adenosine deaminase. An “adenosine deaminase” is an enzyme involved in purine metabolism. It is needed for the breakdown of adenosine from food and for the turnover of nucleic acids in tissues. Its primary function in humans is the development and maintenance of the immune system. An adenosine deaminase catalyzes hydrolytic deamination of adenosine (forming inosine, which base pairs as G) in the context of DNA. There are no known natural adenosine deaminases that act on DNA. Instead, known adenosine deaminase enzymes only act on RNA (tRNA or mRNA). Evolved deoxyadenosine deaminase enzymes that accept DNA substrates and deaminate dA to deoxyinosine have been described, e.g., in PCT Application PCT/US2017/045381, filed Aug. 3, 2017, which published as WO 2018/027078, and PCT Application No. PCT/US2019/033848, filed May 23, 2019, which published on Nov. 28, 2019 as WO 2019/226953, each of which is herein incorporated by reference by reference.

[0056] Exemplary adenosine and cytidine base editors are also described in Rees & Liu, Base editing: precision chemistry on the genome and transcriptome of living cells, Nat. Rev. Genet. 2018; 19(12):770-788; as well as U.S. Patent Publication No. 2018/0073012, published Mar. 15, 2018, which issued as U.S. Pat. No. 10,113,163, on Oct. 30, 2018; U.S. Patent Publication No. 2017/0121693, published May 4, 2017, which issued as U.S. Pat. No. 10,167,457 on Jan. 1, 2019; International Publication No. WO 2017/070633, published Apr. 27, 2017; U.S. Patent Publication No. 2015/0166980, published Jun. 18, 2015; U.S. Pat. No. 9,840,699, issued Dec. 12, 2017; and U.S. Pat. No. 10,077,453, issued Sep. 18, 2018, the contents of each of which are incorporated herein by reference in their entireties.

### Cas9

[0057] The term “Cas9” or “Cas9 nuclease” refers to an RNA-guided nuclease comprising a Cas9 domain, or a fragment thereof (e.g., a protein comprising an active or inactive DNA cleavage domain of Cas9, and/or the gRNA binding domain of Cas9). A “Cas9 domain” as used herein, is a protein fragment comprising an active or inactive cleavage domain of Cas9 and/or the gRNA binding domain of Cas9. A “Cas9 protein” is a full length Cas9 protein. A Cas9 nuclease is also referred to sometimes as a casnl nuclease or a CRISPR (Clustered Regularly Interspaced Short Palindromic Repeat)-associated nuclease. CRISPR is an adaptive immune system that provides protection against mobile genetic elements (viruses, transposable elements, and conjugative plasmids). CRISPR clusters contain spacers, sequences complementary to antecedent mobile elements, and target invading nucleic acids. CRISPR clusters are transcribed and processed into CRISPR RNA (crRNA). In type II CRISPR systems correct processing of pre-crRNA requires a trans-encoded small RNA (tracrRNA), endogenous ribonuclease 3 (rnc) and a Cas9 domain. The tracrRNA serves as a guide for ribonuclease 3-aided processing of pre-crRNA. Subsequently, Cas9/crRNA/tracrRNA endonucleolytically cleaves linear or circular dsDNA target complementary to the spacer. The target strand not complementary to crRNA is first cut endonucleolytically, then trimmed 3′-5′ exonucleolytically. In nature, DNA-binding and cleavage typically requires protein and both RNAs. However, single guide RNAs (“sgRNA”, or simply “gNRA”) can be engineered so as to incorporate aspects of both the crRNA and tracrRNA into a single RNA species. See, e.g., Jinek M., Chylinski K., Fonfara I., Hauer M., Doudna J.A., Charpentier E. Science 337:816-821(2012), the entire contents of which are hereby incorporated by reference. Cas9 recognizes a short motif in the CRISPR repeat sequences (the PAM or protospacer adjacent motif) to help distinguish self versus non-self. Cas9 nuclease sequences and structures are well known to those of skill in the art (see, e.g., “Complete genome sequence of an M1 strain of Streptococcus pyogenes.” Ferretti et al., J. J., McShan W. M., Ajdic D. J., Savic D. J., Savic G., Lyon K., Primeaux C., Sezate S., Suvorov A. N., Kenton S., Lai H. S., Lin S. P., Qian Y., Jia H. G., Najar F. Z., Ren Q., Zhu H., Song L., White J., Yuan X., Clifton S. W., Roe B. A., McLaughlin R. E., Proc. Natl. Acad. Sci. U.S.A. 98:4658-4663(2001); “CRISPR RNA maturation by trans-encoded small RNA and host factor RNase III.” Deltcheva E., Chylinski K., Sharma C. M., Gonzales K., Chao Y., Pirzada Z. A., Eckert M. R., Vogel J., Charpentier E., Nature 471:602-607(2011); and “A programmable dual-RNA-guided DNA endonuclease in adaptive bacterial immunity.” Jinek M., Chylinski K., Fonfara I., Hauer M., Doudna J. A., Charpentier E. Science 337:816-821(2012), the entire contents of each of which are incorporated herein by reference). Cas9 orthologs have been described in various species, including, but not limited to, S. pyogenes and S. thermophilus (e.g., StCas9 or St1Cas9). Additional suitable Cas9 nucleases and sequences will be apparent to those of skill in the art based on this disclosure, and such Cas9 nucleases and sequences include Cas9 sequences from the organisms and loci disclosed in Chylinski, Rhun, and Charpentier, “The tracrRNA and Cas9 families of type II CRISPR-Cas immunity systems” (2013) RNA Biology 10:5, 726-737; the entire contents of which are incorporated herein by reference. In some embodiments, a Cas9 nuclease comprises one or more mutations that partially impair or inactivate the DNA cleavage domain.

[0058] A nuclease-inactivated Cas9 domain may interchangeably be referred to as a “dCas9” protein (for nuclease-“dead” Cas9). Methods for generating a Cas9 domain (or a fragment thereof) having an inactive DNA cleavage domain are known (see, e.g., Jinek et al., Science. 337:816-821(2012); Qi et al., “Repurposing CRISPR as an RNA-Guided Platform for Sequence-Specific Control of Gene Expression” (2013) Cell. 28;152(5):1173-83, the entire contents of each of which are incorporated herein by reference). For example, the DNA cleavage domain of Cas9 is known to include two subdomains, the HNH nuclease subdomain and the RuvC1 subdomain. The HNH subdomain cleaves the strand complementary to the gRNA, whereas the RuvC1 subdomain cleaves the non-complementary strand. Mutations within these subdomains can silence the nuclease activity of Cas9. For example, the mutations D10A and H840A completely inactivate the nuclease activity of S. pyogenes Cas9 (Jinek et al., Science. 337:816-821(2012); Qi et al., Cell. 28; 152(5):1173-83 (2013)). In some embodiments, proteins comprising fragments of Cas9 are provided. For example, in some embodiments, a protein comprises one of two Cas9 domains: (1) the gRNA binding domain of Cas9; or (2) the DNA cleavage domain of Cas9. In some embodiments, proteins comprising Cas9 or fragments thereof are referred to as “Cas9 variants.” A Cas9 variant shares homology to Cas9, or a fragment thereof. For example, a Cas9 variant is at least about 70% identical, at least about 80% identical, at least about 90% identical, at least about 95% identical, at least about 96% identical, at least about 97% identical, at least about 98% identical, at least about 99% identical, at least about 99.5% identical, at least about 99.8% identical, or at least about 99.9% identical to wild type Cas9 (e.g., SpCas9 of SEQ ID NO: 74). In some embodiments, the Cas9 variant may have 1, 2, 3, 4, 5, 6, 7, 8, 9, 10, 11, 12, 13, 14, 15, 16, 17, 18, 19, 20, 21, 22, 21, 24, 25, 26, 27, 28, 29, 30, 31, 32, 33, 34, 35, 36, 37, 38, 39, 40, 41, 42, 43, 44, 45, 46, 47, 48, 49, 50, or more amino acid changes compared to wild type Cas9 (e.g., SpCas9 of SEQ ID NO: 74). In some embodiments, the Cas9 variant comprises a fragment of Cas9 (e.g., a gRNA binding domain or a DNA-cleavage domain), such that the fragment is at least about 70% identical, at least about 80% identical, at least about 90% identical, at least about 95% identical, at least about 96% identical, at least about 97% identical, at least about 98% identical, at least about 99% identical, at least about 99.5% identical, or at least about 99.9% identical to the corresponding fragment of wild type Cas9 (e.g., SpCas9 of SEQ ID NO: 74). In some embodiments, the fragment is at least 30%, at least 35%, at least 40%, at least 45%, at least 50%, at least 55%, at least 60%, at least 65%, at least 70%, at least 75%, at least 80%, at least 85%, at least 90%, at least 95% identical, at least 96%, at least 97%, at least 98%, at least 99%, or at least 99.5% of the amino acid length of a corresponding wild type Cas9 (e.g., SpCas9 of SEQ ID NO: 74).

[0059] As used herein, the term “nCas9” or “Cas9 nickase” refers to a Cas9 or a variant thereof, which cleaves or nicks only one of the strands of a target cut site thereby introducing a nick in a double strand DNA molecule rather than creating a double strand break. This can be achieved by introducing appropriate mutations in a wild-type Cas9 which inactivates one of the two endonuclease activities of the Cas9. Any suitable mutation which inactivates one Cas9 endonuclease activity but leaves the other intact is contemplated, such as one of D10A or H840A mutations in the wild-type S. pyogenes Cas9 amino acid sequence, or a D10A mutation in the wild-type S. aureus Cas9 amino acid sequence, may be used to form the nCas9.

cDNA

[0060] The term “cDNA” refers to a strand of DNA copied from an RNA template. cDNA is complementary to the RNA template.

### Circular Permutant

[0061] As used herein, the term “circular permutant” refers to a protein or polypeptide (e.g., a Cas9) comprising a circular permutation, which is change in the protein's structural configuration involving a change in order of amino acids appearing in the protein's amino acid sequence. In other words, circular permutants are proteins that have altered N- and C-termini as compared to a wild-type counterpart, e.g., the wild-type C-terminal half of a protein becomes the new N-terminal half. Circular permutation (or CP) is essentially the topological rearrangement of a protein's primary sequence, connecting its N- and C-terminus, often with a peptide linker, while concurrently splitting its sequence at a different position to create new, adjacent N- and C-termini. The result is a protein structure with different connectivity, but which often can have the same overall similar three-dimensional (3D) shape, and possibly include improved or altered characteristics, including, reduced proteolytic susceptibility, improved catalytic activity, altered substrate or ligand binding, and/or improved thermostability. Circular permutant proteins can occur in nature (e.g., concanavalin A and lectin). In addition, circular permutation can occur as a result of posttranslational modifications or may be engineered using recombinant techniques.

Circularly Permuted napDNAbp

[0062] The term “circularly permuted napDNAbp” refers to any napDNAbp protein, or variant thereof (e.g., SpCas9), that occurs as or engineered as a circular permutant, whereby its N- and C-termini have been topically rearranged. Such circularly permuted proteins (“CP-napDNAbp”, such as “CP-Cas9” in the case of Cas9), or variants thereof, retain the ability to bind DNA when complexed with a guide RNA (gRNA). See, Oakes et al., “Protein Engineering of Cas9 for enhanced function,” Methods Enzymol, 2014, 546: 491-511 and Oakes et al., “CRISPR-Cas9 Circular Permutants as Programmable Scaffolds for Genome Modification,” Cell, Jan. 10, 2019, 176: 254-267, each of are incorporated herein by reference. The present disclosure contemplates any previously known CP-Cas9 or use a new CP-Cas9 so long as the resulting circularly permuted protein retains the ability to bind DNA when complexed with a guide RNA (gRNA).

### Cytidine Deaminase

[0063] As used herein, a “cytidine deaminase” encoded by the CDA gene is an enzyme that catalyzes the removal of an amine group from cytidine (i.e., the base cytosine when attached to a ribose ring) to uridine (C to U) and deoxycytidine to deoxyuridine (C to U). A non-limiting example of a cytidine deaminase is APOBEC1 (“apolipoprotein B mRNA editing enzyme, catalytic polypeptide 1”). Another example is AID (“activation-induced cytidine deaminase”). Under standard Watson-Crick hydrogen bond pairing, a cytosine base hydrogen bonds to a guanine base. When cytidine is converted to uridine (or deoxycytidine is converted to deoxyuridine), the uridine (or the uracil base of uridine) undergoes hydrogen bond pairing with the base adenine. Thus, a conversion of “C” to uridine (“U”) by cytidine deaminase will cause the insertion of “A” instead of a “G” during cellular repair and/or replication processes. Since the adenine “A” pairs with thymine “T”, the cytidine deaminase in coordination with DNA replication causes the conversion of an C G pairing to a T A pairing in the double-stranded DNA molecule.

### CRISPR

[0064] CRISPR is a family of DNA sequences (i.e., CRISPR clusters) in bacteria and archaea that represent snippets of prior infections by a virus that have invaded the prokaryote. The snippets of DNA are used by the prokaryotic cell to detect and destroy DNA from subsequent attacks by similar viruses and effectively compose, along with an array of CRISPR-associated proteins (including Cas9 and homologs thereof) and CRISPR-associated RNA, a prokaryotic immune defense system. In nature, CRISPR clusters are transcribed and processed into CRISPR RNA (crRNA). In certain types of CRISPR systems (e.g., type II CRISPR systems), correct processing of pre-crRNA requires a trans-encoded small RNA (tracrRNA), endogenous ribonuclease 3 (rnc) and a Cas9 protein. The tracrRNA serves as a guide for ribonuclease 3-aided processing of pre-crRNA. Subsequently, Cas9/crRNA/tracrRNA endonucleolytically cleaves linear or circular dsDNA target complementary to the RNA. Specifically, the target strand not complementary to crRNA is first cut endonucleolytically, then trimmed 3′-5′ exonucleolytically. In nature, DNA-binding and cleavage typically requires protein and both RNAs. However, single guide RNAs (“sgRNA”, or simply “gRNA”) can be engineered so as to incorporate aspects of both the crRNA and tracrRNA into a single RNA species—the guide RNA. See, e.g., Jinek M., Chylinski K., Fonfara I., Hauer M., Doudna J.A., Charpentier E. Science 337:816-821(2012), the entire contents of which is hereby incorporated by reference. Cas9 recognizes a short motif in the CRISPR repeat sequences (the PAM or protospacer adjacent motif) to help distinguish self versus non-self. CRISPR biology, as well as Cas9 nuclease sequences and structures are well known to those of skill in the art (see, e.g., “Complete genome sequence of an M1 strain of Streptococcus pyogenes.” Ferretti et al., J. J., McShan W. M., Ajdic D. J., Savic D. J., Savic G., Lyon K., Primeaux C., Sezate S., Suvorov A. N., Kenton S., Lai H. S., Lin S. P., Qian Y., Jia H. G., Najar F. Z., Ren Q., Zhu H., Song L., White J., Yuan X., Clifton S. W., Roe B. A., McLaughlin R. E., Proc. Natl. Acad. Sci. U.S.A. 98:4658-4663(2001); “CRISPR RNA maturation by trans-encoded small RNA and host factor RNase III.” Deltcheva E., Chylinski K., Sharma C. M., Gonzales K., Chao Y., Pirzada Z. A., Eckert M. R., Vogel J., Charpentier E., Nature 471:602-607(2011); and “A programmable dual-RNA-guided DNA endonuclease in adaptive bacterial immunity.” Jinek M., Chylinski K., Fonfara I., Hauer M., Doudna J. A., Charpentier E. Science 337:816-821(2012), the entire contents of each of which are incorporated herein by reference). Cas9 orthologs have been described in various species, including, but not limited to, S. pyogenes and S. therrnophilus. Additional suitable Cas9 nucleases and sequences will be apparent to those of skill in the art based on this disclosure, and such Cas9 nucleases and sequences include Cas9 sequences from the organisms and loci disclosed in Chylinski, Rhun, and Charpentier, “The tracrRNA and Cas9 families of type II CRISPR-Cas immunity systems” (2013) RNA Biology 10:5, 726-737; the entire contents of which are incorporated herein by reference.

### Deaminase

[0065] The term “deaminase” or “deaminase domain” refers to a protein or enzyme that catalyzes a deamination reaction. In some embodiments, the deaminase is an adenosine (or adenine) deaminase, which catalyzes the hydrolytic deamination of adenine or adenosine. In some embodiments, the adenosine deaminase catalyzes the hydrolytic deamination of adenine or adenosine in deoxyribonucleic acid (DNA) to inosine. In other embodiments, the deminase is a cytidine (or cytosine) deaminase, which catalyzes the hydrolytic deamination of cytidine or cytosine.

[0066] The deaminases described herein may be from any organism, such as a bacterium. In some embodiments, the deaminase or deaminase domain is a variant of a naturally-occurring deaminase from an organism. In some embodiments, the deaminase or deaminase domain does not occur in nature. For example, in some embodiments, the deaminase or deaminase domain is at least 50%, at least 55%, at least 60%, at least 65%, at least 70%, at least 75% at least 80%, at least 85%, at least 90%, at least 95%, at least 96%, at least 97%, at least 98%, at least 99%, or at least 99.5% identical to a naturally-occurring deaminase.

### DNA Binding Protein

[0067] As used herein, the term “DNA binding protein” or “DNA binding protein domain” refers to any protein that localizes to and binds a specific target DNA nucleotide sequence (e.g. a gene locus of a genome). This term embraces RNA-programmable proteins, which associate (e.g. form a complex) with one or more nucleic acid molecules (i.e., which includes, for example, guide RNA in the case of Cas systems) that direct or otherwise program the protein to localize to a specific target nucleotide sequence (e.g., DNA sequence) that is complementary to the one or more nucleic acid molecules (or a portion or region thereof) associated with the protein. Exemplary RNA-programmable proteins are CRISPR-Cas9 proteins, as well as Cas9 equivalents, homologs, orthologs, or paralogs, whether naturally occurring or non-naturally occurring (e.g. engineered or modified), and may include a Cas9 equivalent from any type of CRISPR system (e.g. type II, V, VI), including Cpf1 (a type-V CRISPR-Cas systems), C2c1 (a type V CRISPR-Cas system), C2c2 (a type VI CRISPR-Cas system), C2c3 (a type V CRISPR-Cas system), dCas9, GeoCas9, CjCas9, Cas12a, (e.g., LbCas12a, AsCas12a, CeCas12a and MbCas12a), Cas12b, Cas12c, Cas12d, Cas12g, Cas12h, Cas12i, Cas13d, Cas14, Argonaute (Ago), nCas9, xCas9, SpCas9-NG, SaCas9-KKH, SmacCas9, Spy-macCas9, SpCas9-NRRH, SpCas9-NRCH, SpCas9-NRTH, SpCas9-VQR, and circularly permuted Cas9 domains, such as CP1012, CP1028, CP1041, CP1249, and CP1300. Additional napDNAbp Cas equivalents include Cas3 and Cas(I). Additional Cas-equivalents are described in Makarova et al., “C2c2 is a single-component programmable RNA-guided RNA-targeting CRISPR effector,” Science 2016; 353(6299), the contents of which are incorporated herein by reference.

### DNA Editing Efficiency

[0068] The term “DNA editing efficiency,” as used herein, refers to the number or proportion of intended base pairs that are edited. For example, if a base editor edits 10% of the base pairs that it is intended to target (e.g., within a cell or within a population of cells), then the base editor can be described as being 10% efficient. Some aspects of editing efficiency embrace the modification (e.g. deamination) of a specific nucleotide within DNA, without generating a large number or percentage of insertions or deletions (i.e., indels). It is generally accepted that editing while generating less than 5% indels (as measured over total target nucleotide substrates) is high editing efficiency. The generation of more than 20% indels is generally accepted as poor or low editing efficiency. Indel formation may be measured by techniques known in the art, including high-throughput screening of sequencing reads.

[0069] The term “off-target editing frequency,” as used herein, refers to the number or proportion of unintended base pairs, e.g. DNA base pairs, that are edited. On-target and off-target editing frequencies may be measured by the methods and assays described herein, further in view of techniques known in the art, including high-throughput sequencing reads. As used herein, high-throughput sequencing involves the hybridization of nucleic acid primers (e.g., DNA primers) with complementarity to nucleic acid (e.g., DNA) regions just upstream or downstream of the target sequence or off-target sequence of interest. Because the DNA target sequence and the Cas9-independent off-target sequences are known a priori in the methods disclosed herein, nucleic acid primers with sufficient complementarity to regions upstream or downstream of the target sequence and Cas9-independent off-target sequences of interest may be designed using techniques known in the art, such as the PhusionU PCR kit (Life Technologies), Phusion HS II kit (Life Technologies), and Illumina MiSeq kit. The number of off-target DNA edits may be measured by techniques known in the art, including high-throughput screening of sequencing reads, EndoV-Seq, GUIDE-Seq, CIRCLE-Seq, and Cas-OFFinder. Since many of the Cas9-dependent off-target sites have high sequence identity to the target site of interest, nucleic acid primers with sufficient complementarity to regions upstream or downstream of the Cas9-dependent off-target site may likewise be designed using techniques and kits known in the art. These kits make use of polymerase chain reaction (PCR) amplification, which produces amplicons as intermediate products. The target and off-target sequences may comprise genomic loci that further comprise protospacers and PAMs. Accordingly, the term “amplicons,” as used herein, may refer to nucleic acid molecules that constitute the aggregates of genomic loci, protospacers and PAMs. High-throughput sequencing techniques used herein may further include Sanger sequencing and Illumina-based next-generation genome sequencing (NGS).

[0070] The term “on-target editing,” as used herein, refers to the introduction of intended modifications (e.g., deaminations) to nucleotides (e.g., adenine) in a target sequence, such as using the base editors described herein. The term “off-target DNA editing,” as used herein, refers to the introduction of unintended modifications (e.g. deaminations) to nucleotides (e.g. adenine) in a sequence outside the canonical base editor binding window (i.e., from one protospacer position to another, typically 2 to 8 nucleotides long). Off-target DNA editing can result from weak or non-specific binding of the gRNA sequence to the target sequence. As used herein, the term “bystander editing” refers to synonymous off-target point mutations at nucleobases that are near (proximate to) the target base and do not change the outcome of the intended editing method.

[0071] As used herein, the terms “purity” and “product purity” of a base editor refer to the mean the percentage of edited sequencing reads (reads in which the target nucleobase has been converted to a different base) in which the intended conversion occurs (e.g., for a cytosine base editor, in which the target C is edited to a T). See Komor et al., Sci Adv 3 (2017).

### Downstream

[0072] As used herein, the terms “upstream” and “downstream” are terms of relativety that define the linear position of at least two elements located in a nucleic acid molecule (whether single or double-stranded) that is orientated in a 5′-to-3′ direction. In particular, a first element is upstream of a second element in a nucleic acid molecule where the first element is positioned somewhere that is 5′ to the second element. For example, a SNP is upstream of a Cas9-induced nick site if the SNP is on the 5′ side of the nick site. Conversely, a first element is downstream of a second element in a nucleic acid molecule where the first element is positioned somewhere that is 3′ to the second element. For example, a SNP is downstream of a Cas9-induced nick site if the SNP is on the 3 ′ side of the nick site. The nucleic acid molecule can be a DNA (double or single stranded). RNA (double or single stranded), or a hybrid of DNA and RNA. The analysis is the same for single strand nucleic acid molecule and a double strand molecule since the terms upstream and downstream are in reference to only a single strand of a nucleic acid molecule, except that one needs to select which strand of the double stranded molecule is being considered. Often, the strand of a double stranded DNA which can be used to determine the positional relativity of at least two elements is the “sense” or “coding” strand. In genetics, a “sense” strand is the segment within double-stranded DNA that runs from 5′ to 3′, and which is complementary to the antisense strand of DNA, or template strand, which runs from 3′ to 5′. Thus, as an example, a SNP nucleobase is “downstream” of a promoter sequence in a genomic DNA (which is double-stranded) if the SNP nucleobase is on the 3′ side of the promoter on the sense or coding strand.

### Effective Amount

[0073] The term “effective amount,” as used herein, refers to an amount of a biologically active agent that is sufficient to elicit a desired biological response. For example, in some embodiments, an effective amount of a base editor may refer to the amount of the editor that is sufficient to edit a target site nucleotide sequence, e.g., a genome. In some embodiments, an effective amount of a base editor described herein, e.g., of a base editor comprising a nickase Cas9 domain and a guide RNA may refer to the amount of the base editor that is sufficient to induce editing of a target site specifically bound and edited by the base editor. As will be appreciated by the skilled artisan, the effective amount of an agent, e.g., a base editor, a nuclease, a hybrid protein, a protein dimer, a complex of a protein (or protein dimer) and a polynucleotide, or a polynucleotide, may vary depending on various factors as, for example, on the desired biological response, e.g., on the specific allele, genome, or target site to be edited, on the cell or tissue being targeted, and on the agent being used.

### Functional Equivalent

[0074] The term “functional equivalent” refers to a second biomolecule that is equivalent in function, but not necessarily equivalent in structure to a first biomolecule. For example, a “Cas9 equivalent” refers to a protein that has the same or substantially the same functions as Cas9, but not necessarily the same amino acid sequence. In the context of the disclosure, the specification refers throughout to “a protein X, or a functional equivalent thereof.” In this context, a “functional equivalent” of protein X embraces any homolog, paralog, fragment, naturally occurring, engineered, circular permutant, mutated, or synthetic version of protein X which bears an equivalent function.

### Fusion Protein

[0075] The term “fusion protein” as used herein refers to a hybrid polypeptide which comprises protein domains from at least two different proteins. One protein may be located at the amino-terminal (N-terminal) portion of the fusion protein or at the carboxy-terminal (C-terminal) protein thus forming an “amino-terminal fusion protein” or a “carboxy-terminal fusion protein,” respectively. A protein may comprise different domains, for example, a nucleic acid binding domain (e.g., the gRNA binding domain of Cas9 that directs the binding of the protein to a target site) and a nucleic acid cleavage domain or a catalytic domain of a nucleic-acid editing protein. Another example includes a Cas9 or equivalent thereof fused to an adenosine deaminae. Any of the proteins described herein may be produced by any method known in the art. For example, the proteins described herein may be produced via recombinant protein expression and purification, which is especially suited for fusion proteins comprising a peptide linker. Methods for recombinant protein expression and purification are well known, and include those described by Green and Sambrook, Molecular Cloning: A Laboratory Manual (4^{th} ed., Cold Spring Harbor Laboratory Press, Cold Spring Harbor, N.Y. (2012)), the entire contents of which are incorporated herein by reference.

### Guide Nucleic Acid

[0076] The term “guide nucleic acid” or “napDNAbp-programming nucleic acid molecule” or equivalently “guide sequence” refers the one or more nucleic acid molecules which associate with and direct or otherwise program a napDNAbp protein to localize to a specific target nucleotide sequence (e.g., a gene locus of a genome) that is complementary to the one or more nucleic acid molecules (or a portion or region thereof) associated with the protein, thereby causing the napDNAbp protein to bind to the nucleotide sequence at the specific target site. A non-limiting example is a guide RNA of a Cas protein of a CRISPR-Cas genome editing system. Chemically, guide nucleic acids can be all RNA, all DNA, or a chimeric of RNA and DNA. The guide nucleic acids may also include nucleotide analogs. Guide nucleic acids can be expressed as transcription products or can be synthesized.

Guide RNA (“gRNA”)

[0077] As used herein, a “guide RNA” can refer to a synthetic fusion of the endogenous bacterial crRNA and tracrRNA that provides both targeting specificity and a scaffold and/or binding ability for Cas9 nuclease to a target DNA. This synthetic fusion does not exist in nature and is also commonly referred to as an sgRNA. However, the term, guide RNA, also embraces equivalent guide nucleic acid molecules that associate with Cas9 equivalents, homologs, orthologs, or paralogs, whether naturally occurring or non-naturally occurring (e.g., engineered or recombinant), and which otherwise program the Cas9 equivalent to localize to a specific target nucleotide sequence. The Cas9 equivalents may include other napDNAbp from any type of CRISPR system (e.g., type II, V, VI), including Cpf1 (a type-V CRISPR-Cas systems), C2c1 (a type V CRISPR-Cas system), C2c2 (a type VI CRISPR-Cas system) and C2c3 (a type V CRISPR-Cas system). Further Cas-equivalents are described in Makarova et al., “C2c2 is a single-component programmable RNA-guided RNA-targeting CRISPR effector,” Science 2016; 353(6299), the contents of which are incorporated herein by reference. Exemplary sequences are and structures of guide RNAs are provided herein. In addition, methods for designing appropriate guide RNA sequences are provided herein.

[0078] A guide RNA is a particular type of guide nucleic acid which is mostly commonly associated with a Cas protein of a CRISPR-Cas9 and which associates with Cas9, directing the Cas9 protein to a specific sequence in a DNA molecule that includes complementarity to the protospacer sequence for the guide RNA. Functionally, guide RNAs associate with Cas9, directing (or programming) the Cas9 protein to a specific sequence in a DNA molecule that includes a sequence complementary to the protospacer sequence for the guide RNA.

[0079] As used herein, a “spacer sequence” is the sequence of the guide RNA (-20 nts in length) which has the same sequence (with the exception of uridine bases in place of thymine bases) as the protospacer of the PAM strand of the target (DNA) sequence, and which is complementary to the target strand (or non-PAM strand) of the target sequence.

### Guide RNA Target Sequence

[0080] As used herein, the “target sequence” refers to the ˜20 nucleotides in the target DNA sequence that have complementarity to the protospacer sequence in the PAM strand. The target sequence is the sequence that anneals to or is targeted by the spacer sequence of the guide RNA. The spacer sequence of the guide RNA and the protospacer have the same sequence (except the spacer sequence is RNA, and the protospacer is DNA).

### Guide RNA Scaffold Sequence

[0081] As used herein, the terms “guide RNA core,” “guide RNA scaffold sequence” and “backbone sequence” refer to the sequence within the gRNA that is responsible for Cas9 binding, it does not include the 20 bp spacer sequence that is used to guide Cas9 to target DNA.

### Host Cell

[0082] The term “host cell,” as used herein, refers to a cell that can host and replicate a vector encoding a base editor, guide RNA, and/or combination thereof, as described herein. In some embodiments, host cells are mammalian cells, such as human cells. Provided herein are methods of transducing and transfecting a host cell, such as a human cell, e.g., a human cell in a subject, with one or more vectors provided herein, such as one or more viral (e.g., rAAV) vectors provided herein.

[0083] It should be appreciated that any of the base editors, guide RNAs, and or combinations thereof, described herein may be introduced into a host cell in any suitable way, either stably or transiently. In some embodiments, a base editor may be transfected into the host cell. In some embodiments, the host cell may be transduced or transfected with a nucleic acid construct that encodes a base editor. For example, a host cell may be transduced (e.g., with a viral particle encoding a base editor) with a nucleic acid that encodes a base editor, or the translated base editor. As an additional example, a host cell may be transfected with a nucleic acid (e.g., a plasmid) that encodes a base editor or the translated base editor. Such transductions or transfections may be stable or transient. In some embodiments, host cells expressing a base editor or containing a base editor may be transduced or transfected with one or more gRNA molecules, for example when the base editor comprises a Cas9 (e.g., nCas9) domain. In some embodiments, a plasmid expressing a base editor may be introduced into host cells through electroporation, transient transfection (e.g., lipofection, such as with Lipofectamine 3000®), stable genome integration (e.g., piggybac), viral transduction, or other methods known to those of skill in the art.

[0084] Also provided herein are host cells for packaging of viral particles. In embodiments where the vector is a viral vector, a suitable host cell is a cell that may be infected by the viral vector, can replicate it, and can package it into viral particles that can infect fresh host cells. A cell can host a viral vector if it supports expression of genes of viral vector, replication of the viral genome, and/or the generation of viral particles. In some embodiments, the host cell is a eukaryotic cell, for example, a yeast cell, an insect cell, or a mammalian cell. The type of host cell, will, of course, depend on the vector employed, and suitable host cell/vector combinations will be readily apparent to those of skill in the art.

### Inteins and Split-Inteins

[0085] As used herein, the term “intein” refers to auto-processing polypeptide domains found in organisms from all domains of life. An intein (intervening protein) carries out a unique auto-processing event known as protein splicing in which it excises itself out from a larger precursor polypeptide through the cleavage of two peptide bonds and, in the process, ligates the flanking extein (external protein) sequences through the formation of a new peptide bond. This rearrangement occurs post-translationally (or possibly co-translationally), as intein genes are found embedded in frame within other protein-coding genes. Furthermore, intein-mediated protein splicing is spontaneous; it requires no external factor or energy source, only the folding of the intein domain. This process is also known as cis-protein splicing, as opposed to the natural process of trans-protein splicing with “split inteins.”

[0086] Split inteins are a sub-category of inteins. Unlike the more common contiguous inteins, split inteins are transcribed and translated as two separate polypeptides, the N-intein and C-intein, each fused to one extein. Upon translation, the intein fragments spontaneously and non-covalently assemble into the canonical intein structure to carry out protein splicing in trans.

[0087] Inteins and split inteins are the protein equivalent of the self-splicing RNA introns (see Perler et al., Nucleic Acids Res. 22:1125-1127 (1994)), which catalyze their own excision from a precursor protein with the concomitant fusion of the flanking protein sequences, known as exteins (reviewed in Perler et al., Curr. Opin. Chem. Biol. 1:292-299 (1997); Perler, F. B. Cell 92(1):1-4 (1998); Xu et al., EMBO J. 15(19):5146-5153 (1996)).

[0088] As used herein, the term “protein splicing” refers to a process in which an interior region of a precursor protein (an intein) is excised and the flanking regions of the protein (exteins) are ligated to form the mature protein. This natural process has been observed in numerous proteins from both prokaryotes and eukaryotes (Perler, F. B., Xu, M. Q., Paulus, H. Current Opinion in Chemical Biology 1997, 1, 292-299; Perler, F. B. Nucleic Acids Research 1999, 27, 346-347). The intein unit contains the necessary components needed to catalyze protein splicing and often contains an endonuclease domain that participates in intein mobility (Perler, F. B., Davis, E. 0., Dean, G. E., Gimble, F. S., Jack, W. E., Neff, N., Noren, C. J., Thomer, J., Belfort, M. Nucleic Acids Research 1994, 22, 1127-1127). The resulting proteins are linked, however, not expressed as separate proteins. Protein splicing may also be conducted in trans with split inteins expressed on separate polypeptides spontaneously combine to form a single intein which then undergoes the protein splicing process to join to separate proteins.

[0089] The elucidation of the mechanism of protein splicing has led to a number of intein-based applications (Comb, et al., U.S. Pat. No. 5,496,714; Comb, et al., U.S. Pat. No. 5,834,247; Camarero and Muir, J. Amer. Chem. Soc., 121:5597-5598 (1999); Chong, et al., Gene, 192:271-281 (1997), Chong, et al., Nucleic Acids Res., 26:5109-5115 (1998); Chong, et al., J. Biol. Chem., 273:10567-10577 (1998); Cotton, et al. J. Am. Chem. Soc., 121:1100-1101 (1999); Evans, et al., J. Biol. Chem., 274:18359-18363 (1999); Evans, et al., J. Biol. Chem., 274:3923-3926 (1999); Evans, et al., Protein Sci., 7:2256-2264 (1998); Evans, et al., J. Biol. Chem., 275:9091-9094 (2000); Iwai and Pluckthun, FEBS Lett. 459:166-172 (1999); Mathys, et al., Gene, 231:1-13 (1999); Mills, et al., Proc. Natl. Acad. Sci. USA 95:3543-3548 (1998); Muir, et al., Proc. Natl. Acad. Sci. USA 95:6705-6710 (1998); Otomo, et al., Biochemistry 38:16040-16044 (1999); Otomo, et al., J. Biolmol. NMR 14:105-114 (1999); Scott, et al., Proc. Natl. Acad. Sci. USA 96:13638-13643 (1999); Severinov and Muir, J. Biol. Chem., 273:16205-16209 (1998); Shingledecker, et al., Gene, 207:187-195 (1998); Southworth, et al., EMBO J. 17:918-926 (1998); Southworth, et al., Biotechniques, 27:110-120 (1999); Wood, et al., Nat. Biotechnol., 17:889-892 (1999); Wu, et al., Proc. Natl. Acad. Sci. USA 95:9226-9231 (1998a); Wu, et al., Biochim Biophys Acta 1387:422-432 (1998b); Xu, et al., Proc. Natl. Acad. Sci. USA 96:388-393 (1999); Yamazaki, et al., J. Am. Chem. Soc., 120:5591-5592 (1998)). Each reference is incorporated herein by reference.

### Linker

[0090] The term “linker,” as used herein, refers to a chemical group or a molecule linking two molecules or domains, e.g. dCas9 and a deaminase. Typically, the linker is positioned between, or flanked by, two groups, molecules, or other domains and connected to each one via a covalent bond, thus connecting the two. In some embodiments, the linker is an amino acid or a plurality of amino acids (e.g. a peptide or protein). In some embodiments, the linker is an organic molecule, group, polymer, or chemical domain. Chemical groups include, but are not limited to, disulfide, hydrazone, and azide domains. In some embodiments, the linker is 5-100 amino acids in length, for example, 5, 6, 7, 8, 9, 10, 11, 12, 13, 14, 15, 16, 17, 18, 19, 20, 21, 22, 23, 24, 25, 26, 27, 28, 29, 30, 30-35, 35-40, 40-45, 45-50, 50-60, 60-70, 70-80, 80-90, 90-100, 100-150, or 150-200 amino acids in length. Longer or shorter linkers are also contemplated. In some embodiments, the linker is an XTEN linker. In some embodiments, the linker is a 32-amino acid linker. In other embodiments, the linker is a 30-, 31-, 33- or 34-amino acid linker.

### Mutation

[0091] The term “mutation,” as used herein, refers to a substitution of a residue within a sequence, e.g. a nucleic acid or amino acid sequence, with another residue; a deletion or insertion of one or more residues within a sequence; or a substitution of a residue within a sequence of a genome in a subject to be corrected. Mutations are typically described herein by identifying the original residue followed by the position of the residue within the sequence and by the identity of the newly substituted residue. Various methods for making the amino acid substitutions (mutations) provided herein are well known in the art, and are provided by, for example, Green and Sambrook, Molecular Cloning: A Laboratory Manual (4^{th} ed., Cold Spring Harbor Laboratory Press, Cold Spring Harbor, N.Y. (2012)). Mutations can include a variety of categories, such as single base polymorphisms, microduplication regions, indel, and inversions, and is not meant to be limiting in any way. Mutations can include “loss-of-function” mutations which are mutations that reduce or abolish a protein activity. Most loss-of-function mutations are recessive, because in a heterozygote the second chromosome copy carries an unmutated version of the gene coding for a fully functional protein whose presence compensates for the effect of the mutation. There are some exceptions where a loss-of-function mutation is dominant, one example being haploinsufficiency, where the organism is unable to tolerate the approximately 50% reduction in protein activity suffered by the heterozygote. This is the explanation for a few genetic diseases in humans, including Marfan syndrome, which results from a mutation in the gene for the connective tissue protein called fibrillin. Mutations also embrace “gain-of-function” mutations, which is one which confers an abnormal activity on a protein or cell that is otherwise not present in a normal condition. Many gain-of-function mutations are in regulatory sequences rather than in coding regions, and can therefore have a number of consequences. Because of their nature, gain-of-function mutations are usually dominant. Many loss-of-function mutations are recessive, such as autosomal recessive. Many of the USH2A mutations for which the presently disclosed base editing methods aim to correct are autosomal recessive.

napDNAbp

[0092] The term “napDNAbp” which stand for “nucleic acid programmable DNA binding protein” refers to any protein that may associate (e.g., form a complex) with one or more nucleic acid molecules (i.e., which may broadly be referred to as a “napDNAbp-programming nucleic acid molecule” and includes, for example, guide RNA in the case of Cas systems) which direct or otherwise program the protein to localize to a specific target nucleotide sequence (e.g., a gene locus of a genome) that is complementary to the one or more nucleic acid molecules (or a portion or region thereof) associated with the protein, thereby causing the protein to bind to the nucleotide sequence at the specific target site. This term napDNAbp embraces CRISPR-Cas9 proteins, as well as Cas9 equivalents, homologs, orthologs, or paralogs, whether naturally occurring or non-naturally occurring (e.g., engineered or modified), and may include a Cas9 equivalent from any type of CRISPR system (e.g., type II, V, VI), including Cpf1 (a type-V CRISPR-Cas systems), C2c1 (a type V CRISPR-Cas system), C2c2 (a type VI CRISPR-Cas system), C2c3 (a type V CRISPR-Cas system), dCas9, GeoCas9, CjCas9, Cas12a, Cas12b, Cas12c, Cas12d, Cas12g, Cas12h, Cas12i, Cas13d, Cas14, Argonaute, and nCas9. Further Cas-equivalents are described in Makarova et al., “C2c2 is a single-component programmable RNA-guided RNA-targeting CRISPR effector,” Science 2016; 353 (6299), the contents of which are incorporated herein by reference. However, the nucleic acid programmable DNA binding protein (napDNAbp) that may be used in connection with this invention are not limited to CRISPR-Cas systems. The invention embraces any such programmable protein, such as the Argonaute protein from Natronobacteriurn gregoryi (NgAgo) which may also be used for DNA-guided genome editing. NgAgo-guide DNA system does not require a PAM sequence or guide RNA molecules, which means genome editing can be performed simply by the expression of generic NgAgo protein and introduction of synthetic oligonucleotides on any genomic sequence. See Gao et al., DNA-guided genome editing using the Natronobacterium gregoryi Argonaute. Nature Biotechnology 2016; 34(7):768-73, which is incorporated herein by reference.

[0093] In some embodiments, the napDNAbp is a RNA-programmable nuclease, when in a complex with an RNA, may be referred to as a nuclease:RNA complex. Typically, the bound RNA(s) is referred to as a guide RNA (gRNA). gRNAs can exist as a complex of two or more RNAs, or as a single RNA molecule. gRNAs that exist as a single RNA molecule may be referred to as single-guide RNAs (sgRNAs), though “gRNA” is used interchangeably to refer to guide RNAs that exist as either single molecules or as a complex of two or more molecules. Typically, gRNAs that exist as single RNA species comprise two domains: (1) a domain that shares homology to a target nucleic acid (e.g., and directs binding of a Cas9 (or equivalent) complex to the target); and (2) a domain that binds a Cas9 protein. In some embodiments, domain (2) corresponds to a sequence known as a tracrRNA, and comprises a stem-loop structure. For example, in some embodiments, domain (2) is homologous to a tracrRNA as depicted in FIG. 1E of Jinek et al., Science 337:816-821(2012), the entire contents of which is incorporated herein by reference. Other examples of gRNAs (e.g., those including domain 2) can be found in U.S. Pat. No. 9,340,799, entitled “mRNA-Sensing Switchable gRNAs,” and International Patent Application No. PCT/US2014/054247, filed Sep. 6, 2013, published as WO 2015/035136 and entitled “Delivery System For Functional Nucleases,” the entire contents of each are herein incorporated by reference. In some embodiments, a gRNA comprises two or more of domains (1) and (2), and may be referred to as an “extended gRNA.” For example, an extended gRNA will, e.g., bind two or more Cas9 proteins and bind a target nucleic acid at two or more distinct regions, as described herein. The gRNA comprises a nucleotide sequence that complements a target site, which mediates binding of the nuclease/RNA complex to said target site, providing the sequence specificity of the nuclease:RNA complex. In some embodiments, the RNA-programmable nuclease is the (CRISPR-associated system) Cas9 endonuclease, for example Cas9 (Csnl) from Streptococcus pyogenes (see, e.g., “Complete genome sequence of an M1 strain of Streptococcus pyogenes.” Ferretti J. J. et al., Proc. Natl. Acad. Sci. U.S.A. 98:4658-4663(2001); “CRISPR RNA maturation by trans-encoded small RNA and host factor RNase III.” Deltcheva E. et al., Nature 471:602-607(2011); and “A programmable dual-RNA-guided DNA endonuclease in adaptive bacterial immunity.” Jinek M. et al., Science 337:816-821(2012), the entire contents of each of which are incorporated herein by reference. The napDNAbp nucleases (e.g., Cas9) use RNA:DNA hybridization to target DNA cleavage sites, these proteins are able to be targeted, in principle, to any sequence specified by the guide RNA. Methods of using napDNAbp nucleases, such as Cas9, for site-specific cleavage (e.g., to modify a genome) are known in the art (see e.g., Cong, L. et al. Multiplex genome engineering using CRISPR/Cas systems. Science 339, 819-823 (2013); Mali, P. et al. RNA-guided human genome engineering via Cas9. Science 339, 823-826 (2013); Hwang, W. Y. et al. Efficient genome editing in zebrafish using a CRISPR-Cas system. Nature Biotechnology 31, 227-229 (2013); Jinek, M. et al. RNA-programmed genome editing in human cells. eLife 2, e00471 (2013); Dicarlo, J. E. et al., Genome engineering in Saccharomyces cerevisiae using CRISPR-Cas systems. Nucleic Acid Res. (2013); Jiang, W. et al. RNA-guided editing of bacterial genomes using CRISPR-Cas systems. Nature Biotechnology 31, 233-239 (2013); the entire contents of each of which are incorporated herein by reference).

### Nickase

[0094] The term “nickase” refers to a napDNAbp (e.g., a Cas9) having only a single nuclease activity that cuts only one strand of a target DNA, rather than both strands. Thus, a nickase type napDNAbp does not leave a double-strand break. Exemplary nickases include SpCas9 and SaCas9 nickases. An exemplary nickase comprises a sequence having at least 99%, or 100%, identity to the amino acid sequence of SEQ ID NO: 107.

### Nuclear Localization Signal

[0095] A nuclear localization signal or sequence (NLS) is an amino acid sequence that tags, designates, or otherwise marks a protein for import into the cell nucleus by nuclear transport. Typically, this signal consists of one or more short sequences of positively charged lysines or arginines exposed on the protein surface. Different nuclear localized proteins may share the same NLS. An NLS has the opposite function of a nuclear export signal (NES), which targets proteins out of the nucleus. Thus, a single nuclear localization signal can direct the entity with which it is associated to the nucleus of a cell. Such sequences may be of any size and composition, for example, more than 25, 25, 15, 12, 10, 8, 7, 6, 5, or 4 amino acids, but will preferably comprise at least a four to eight amino acid sequence known to function as a nuclear localization signal (NLS).

### Nucleic Acid Molecule

[0096] The term “nucleic acid molecule” as used herein, refers to RNA as well as single and/or double-stranded DNA. Nucleic acid molecules may be naturally occurring, for example, in the context of a genome, a transcript, an mRNA, tRNA, rRNA, siRNA, snRNA, a plasmid, cosmid, chromosome, chromatid, or other naturally occurring nucleic acid molecule. On the other hand, a nucleic acid molecule may be a non-naturally occurring molecule, e.g. a recombinant DNA or RNA, an artificial chromosome, an engineered genome, or fragment thereof, or a synthetic DNA, RNA, DNA/RNA hybrid, or including non-naturally occurring nucleotides or nucleosides.

[0097] Furthermore, the terms “nucleic acid,” “DNA,” “RNA,” and/or similar terms include nucleic acid analogs, e.g. analogs having other than a phosphodiester backbone. Nucleic acids may be purified from natural sources, produced using recombinant expression systems and optionally purified, chemically synthesized, etc. Where appropriate, e.g. in the case of chemically synthesized molecules, nucleic acids may comprise nucleoside analogs such as analogs having chemically modified bases or sugars, and backbone modifications. A nucleic acid sequence is presented in the 5′ to 3′ direction unless otherwise indicated. In some embodiments, a nucleic acid is or comprises natural nucleosides (e.g. adenosine, thymidine, guanosine, cytidine, uridine, deoxyadenosine, deoxythymidine, deoxyguanosine, and deoxycytidine); nucleoside analogs (e.g. 2-aminoadenosine, 2-thiothymidine, inosine, pyrrolo-pyrimidine, 3-methyl adenosine, 5-methylcytidine, 2-aminoadenosine, C5-bromouridine, C5-fluorouridine, C5-iodouridine, C5-propynyl-uridine, C5-propynyl-cytidine, C5-methylcytidine, 2-aminoadenosine, 7-deazaadenosine, 7-deazaguanosine, inosinedenosine, 8-oxoguanosine, O(6)-methylguanine, and 2-thiocytidine); chemically modified bases; biologically modified bases (e.g., methylated bases, such as 2′-O-methylated bases); intercalated bases; modified sugars (e.g. 2′-fluororibose, ribose, 2′-deoxyribose, arabinose, and hexose); and/or modified phosphate groups (e.g. phosphorothioates and 5′-N-phosphoramidite linkages).

### PACE

[0098] The term “phage-assisted continuous evolution (PACE),” as used herein, refers to continuous evolution that employs phage as viral vectors. The general concept of PACE technology has been described, for example, in International PCT Application, PCT/US2009/056194, filed Sep. 8, 2009, published as WO 2010/028347 on Mar. 11, 2010; International PCT Application, PCT/US2011/066747, filed Dec. 22, 2011, published as WO 2012/088381 on Jun. 28, 2012; U.S. Application, U.S. Pat. No. 9,023,594, issued May 5, 2015, International PCT Application, PCT/US2015/012022, filed Jan. 20, 2015, published as WO 2015/134121 on Sep. 11, 2015, and International PCT Application, PCT/US2016/027795, filed Apr. 15, 2016, published as WO 2016/168631 on Oct. 20, 2016, the entire contents of each of which are incorporated herein by reference.

### Promoter

[0099] The term “promoter” is art-recognized and refers to a nucleic acid molecule with a sequence recognized by the cellular transcription machinery and able to initiate transcription of a downstream gene. A promoter may be constitutively active, meaning that the promoter is always active in a given cellular context, or conditionally active, meaning that the promoter is only active in the presence of a specific condition. For example, a conditional promoter may only be active in the presence of a specific protein that connects a protein associated with a regulatory element in the promoter to the basic transcriptional machinery, or only in the absence of an inhibitory molecule. A subclass of conditionally active promoters is inducible promoters that require the presence of a small molecule “inducer” for activity. Examples of inducible promoters include, but are not limited to, arabinose-inducible promoters, Tet-on promoters, and tamoxifen-inducible promoters. A variety of constitutive, conditional, and inducible promoters are well known to the skilled artisan, and the skilled artisan will be able to ascertain a variety of such promoters useful in carrying out the instant invention, which is not limited in this respect. In various embodiments, the disclosure provides vectors with appropriate promoters for driving expression of the nucleic acid sequences encoding the base editors (or one or more individual components thereof).

### Protospacer

[0100] As used herein, the term “protospacer” refers to the sequence (e.g., a ˜20 bp sequence) in DNA adjacent to the PAM (protospacer adjacent motif) sequence which shares the same sequence as the spacer sequence of the guide RNA, and which is complementary to the target sequence of the non-PAM strand. The spacer sequence of the guide RNA anneals to the target sequence located on the non-PAM strand. In order for Cas9 to function it also requires a specific protospacer adjacent motif (PAM) that varies depending on the bacterial species of the Cas9 gene. The most commonly used Cas9 nuclease, derived from S. pyogenes, recognizes a PAM sequence of NGG that is found directly downstream of the protospacer sequence in the genomic DNA, on the non-target strand. The skilled person will appreciate that the literature in the state of the art sometimes refers to the “protospacer” as the ˜20-nt target-specific guide sequence on the guide RNA itself, rather than referring to it as a “spacer” (and that the protospacer (DNA) and the spacer (RNA) have the same sequence). Thus, the term “protospacer” as used herein may be used interchangeably with the term “spacer.” The context of the discription surrounding the appearance of either “protospacer” or “spacer” will help inform the reader as to whether the term is refence to the gRNA or the DNA sequence. Both usages of these terms are acceptable since the state of the art uses both terms in each of these ways.

### Protospacer Adjacent Motif (PAM)

[0101] As used herein, the term “protospacer adjacent sequence” or “PAM” refers to an approximately 2-6 base pair DNA sequence that is an important targeting component of a Cas9 nuclease. Typically, the PAM sequence is on either strand, and is downstream in the 5′ to 3′ direction of Cas9 cut site. The canonical PAM sequence (i.e., the PAM sequence that is associated with the Cas9 nuclease of Streptococcus pyogenes or SpCas9) is 5′-NGG-3′ wherein “N” is any nucleobase followed by two guanine (“G”) nucleobases. Different PAM sequences can be associated with different Cas9 nucleases or equivalent proteins from different organisms. In addition, any given Cas9 nuclease, e.g., SpCas9, may be modified to alter the PAM specificity of the nuclease such that the nuclease recognizes alternative PAM sequence.

[0102] For example, with reference to the canonical SpCas9 amino acid sequence is SEQ ID NO: 74, the PAM sequence can be modified by introducing one or more mutations, including (a) D1135V, R1335Q, and T1337R “the VRQR variant”, which alters the PAM specificity to NGAN or NGNG, (b) D1135E, R1335Q, and T1337R “the EQR variant”, which alters the PAM specificity to NGAG, and (c) D1135V, G1218R, R1335E, and T1337R “the VRER variant”, which alters the PAM specificity to NGCG. In addition, the D1135E variant of canonical SpCas9 still recognizes NGG, but it is more selective compared to the wild type SpCas9 protein.

[0103] It will also be appreciated that Cas9 enzymes from different bacterial species (i.e., Cas9 orthologs) can have varying PAM specificities. For example, Cas9 from Staphylococcus aureus (SaCas9) recognizes NGRRT or NGRRN. In addition, Cas9 from Neisseria meningitis (NmCas) recognizes NNNNGATT. In another example, Cas9 from Streptococcus thermophilis (StCas9) recognizes NNAGAAW. In still another example, Cas9 from Treponema denticola (TdCas) recognizes NAAAAC. These are example are not meant to be limiting. It will be further appreciated that non-SpCas9s bind a variety of PAM sequences, which makes them useful when no suitable SpCas9 PAM sequence is present at the desired target cut site. Furthermore, non-SpCas9s may have other characteristics that make them more useful than SpCas9. For example, Cas9 from Staphylococcus aureus (SaCas9) is about 1 kilobase smaller than SpCas9, so it can be packaged into adeno-associated virus (AAV). Further reference may be made to Shah et al., “Protospacer recognition motifs: mixed identities and functional diversity,” RNA Biology, 10(5): 891-899 (which is incorporated herein by reference).

### Protein, Peptide, and Polypeptide

[0104] The terms “protein,” “peptide,” and “polypeptide” are used interchangeably herein, and refer to a polymer of amino acid residues linked together by peptide (amide) bonds. The terms refer to a protein, peptide, or polypeptide of any size, structure, or function. Typically, a protein, peptide, or polypeptide will be at least three amino acids long. A protein, peptide, or polypeptide may refer to an individual protein or a collection of proteins. One or more of the amino acids in a protein, peptide, or polypeptide may be modified, for example, by the addition of a chemical entity such as a carbohydrate group, a hydroxyl group, a phosphate group, a farnesyl group, an isofarnesyl group, a fatty acid group, a linker for conjugation, functionalization, or other modification, etc. A protein, peptide, or polypeptide may also be a single molecule or may be a multi-molecular complex. A protein, peptide, or polypeptide may be just a fragment of a naturally occurring protein or peptide. A protein, peptide, or polypeptide may be naturally occurring, recombinant, or synthetic, or any combination thereof. It should be appreciated that the disclosure provides any of the polypeptide sequences provided herein without an N-terminal methionine (M) residue.

### Sense Strand

[0105] In genetics, a “sense” strand is the segment within double-stranded DNA that runs from 5′ to 3′, and which is complementary to the antisense strand of DNA, or template strand, which runs from 3′ to 5′. In the case of a DNA segment that encodes a protein, the sense strand is the strand of DNA that has the same sequence as the mRNA, which takes the antisense strand as its template during transcription, and eventually undergoes (typically, not always) translation into a protein. The antisense strand is thus responsible for the RNA that is later translated to protein, while the sense strand possesses a nearly identical makeup to that of the mRNA. Note that for each segment of dsDNA, there will possibly be two sets of sense and antisense, depending on which direction one reads (since sense and antisense is relative to perspective). It is ultimately the gene product, or mRNA, that dictates which strand of one segment of dsDNA is referred to as sense or antisense.

### Subject

[0106] The term “subject,” as used herein, refers to an individual organism, for example, an individual mammal. In some embodiments, the subject is a human. In some embodiments, the subject is a non-human mammal. In some embodiments, the subject is a non-human primate. In some embodiments, the subject is a rodent. In some embodiments, the subject is a sheep, a goat, cattle, a cat, or a dog. In some embodiments, the subject is a vertebrate, an amphibian, a reptile, a fish, an insect, a fly, or a nematode. In some embodiments, the subject is a research animal. In some embodiments, the subject is genetically engineered, e.g., a genetically engineered non-human subject. The subject may be of either sex and at any stage of development. In some embodiments, the subject is a domesticated animal. In some embodiments, the subject is a plant.

### Target Site

[0107] The term “target site” refers to a sequence within a nucleic acid molecule that is edited by a base editor (BE) disclosed herein. The term “target site,” in the context of a single strand, also can refer to the “target strand” which anneals or binds to the spacer sequence of the guide RNA. The target site can refer, in certain embodiments, to a segment of double-stranded DNA that includes the protospacer (i.e., the strand of the target site that has the same nucleotide sequence as the spacer sequence of the guide RNA) on the PAM-strand (or non-target strand) and target strand, which is complementary to the protospacer and the spacer alike, and which anneals to the spacer of the guide RNA, thereby targeting or programming a Cas9 base editor to target the target site.

### Transcriptional Terminator

[0108] A “transcriptional terminator” is a nucleic acid sequence that causes transcription to stop. A transcriptional terminator may be unidirectional or bidirectional. It is comprised of a DNA sequence involved in specific termination of an RNA transcript by an RNA polymerase. A transcriptional terminator sequence prevents transcriptional activation of downstream nucleic acid sequences by upstream promoters. A transcriptional terminator may be necessary in vivo to achieve desirable expression levels or to avoid transcription of certain sequences. A transcriptional terminator is considered to be “operably linked to” a nucleotide sequence when it is able to terminate the transcription of the sequence it is linked to. The most commonly used type of terminator is a forward terminator. When placed downstream of a nucleic acid sequence that is usually transcribed, a forward transcriptional terminator will cause transcription to abort. In some embodiments, bidirectional transcriptional terminators are provided, which usually cause transcription to terminate on both the forward and reverse strand. In some embodiments, reverse transcriptional terminators are provided, which usually terminate transcription on the reverse strand only.

[0109] In prokaryotic systems, terminators usually fall into two categories (1) rho-independent terminators and (2) rho-dependent terminators. Rho-independent terminators are generally composed of palindromic sequence that forms a stem loop rich in G-C base pairs followed by several T bases. Without wishing to be bound by theory, the conventional model of transcriptional termination is that the stem loop causes RNA polymerase to pause, and transcription of the poly-A tail causes the RNA:DNA duplex to unwind and dissociate from RNA polymerase.

[0110] In eukaryotic systems, the terminator region may comprise specific DNA sequences that permit site-specific cleavage of the new transcript so as to expose a polyadenylation site. This signals a specialized endogenous polymerase to add a stretch of about 200 A residues (polyA) to the 3′ end of the transcript. RNA molecules modified with this polyA tail appear to more stable and are translated more efficiently. Thus, in some embodiments involving eukaryotes, a terminator may comprise a signal for the cleavage of the RNA. In some embodiments, the terminator signal promotes polyadenylation of the message. The terminator and/or polyadenylation site elements may serve to enhance output nucleic acid levels and/or to minimize read through between nucleic acids.

[0111] Terminators for use in accordance with the present disclosure include any terminator of transcription described herein or known to one of ordinary skill in the art. Examples of terminators include, without limitation, the termination sequences of genes such as, for example, the bovine growth hormone terminator, and viral termination sequences such as, for example, the SV40 terminator, spy, yejM, secG-leuU, thrLABC, rrnB Ti, hisLGDCBHAFI, metZWV, rrnC, xapR, aspA and arcA terminator. In some embodiments, the termination signal may be a sequence that cannot be transcribed or translated, such as those resulting from a sequence truncation.

### Transition

[0112] As used herein, “transitions” refer to the interchange of purine nucleobases (A↔G) or the interchange of pyrimidine nucleobases (C↔T). This class of interchanges involves nucleobases of similar shape. The compositions and methods disclosed herein are capable of inducing one or more transitions in a target DNA molecule. The compositions and methods disclosed herein are also capable of inducing both transitions and transversion in the same target DNA molecule. These changes involve A↔G, G↔A, C↔T, or T↔C. In the context of a double-strand DNA with Watson-Crick paired nucleobases, transitions refer to the following base pair exchanges: A:T↔G:C, G:G↔A:T, C:G↔T:A, or T:A↔C:G. The compositions and methods disclosed herein are capable of inducing one or more transitions in a target DNA molecule. The compositions and methods disclosed herein are also capable of inducing both transitions and transversion in the same target DNA molecule, as well as other nucleotide changes, including deletions and insertions.

### Transversion

[0113] As used herein, “transversions” refer to the interchange of purine nucleobases for pyrimidine nucleobases, or in the reverse and thus, involve the interchange of nucleobases with dissimilar shape. These changes involve T↔A, T4->G, C↔G, C↔A, A↔T, A↔C, G↔C, and G↔T. In the context of a double-strand DNA with Watson-Crick paired nucleobases, transversions refer to the following base pair exchanges: T:A↔A:T, T:A↔G:C, C:G↔G:C, C:G↔A:T, A:T↔T:A, A:T↔C:G, G:C↔C:G, and G:C↔T:A. The compositions and methods disclosed herein are capable of inducing one or more transversions in a target DNA molecule. The compositions and methods disclosed herein are also capable of inducing both transitions and transversion in the same target DNA molecule, as well as other nucleotide changes, including deletions and insertions.

### Treatment

[0114] The terms “treatment,” “treat,” and “treating,” refer to a clinical intervention aimed to reverse, alleviate, delay the onset of, or inhibit the progress of a disease or disorder, or one or more symptoms thereof, as described herein. As used herein, the terms “treatment,” “treat,” and “treating” refer to a clinical intervention aimed to reverse, alleviate, delay the onset of, or inhibit the progress of a disease or disorder, or one or more symptoms thereof, as described herein. In some embodiments, treatment may be administered after one or more symptoms have developed and/or after a disease has been diagnosed. In other embodiments, treatment may be administered in the absence of symptoms, e.g., to prevent or delay onset of a symptom or inhibit onset or progression of a disease. For example, treatment may be administered to a susceptible individual prior to the onset of symptoms (e.g., in light of a history of symptoms and/or in light of genetic or other susceptibility factors). Treatment may also be continued after symptoms have resolved, for example, to prevent or delay their recurrence.

### Upstream

[0115] As used herein, the terms “upstream” and “downstream” are terms of relativety that define the linear position of at least two elements located in a nucleic acid molecule (whether single or double-stranded) that is orientated in a 5′-to-3′ direction. In particular, a first element is upstream of a second element in a nucleic acid molecule where the first element is positioned somewhere that is 5′ to the second element. For example, a SNP is upstream of a Cas9-induced nick site if the SNP is on the 5′ side of the nick site. Conversely, a first element is downstream of a second element in a nucleic acid molecule where the first element is positioned somewhere that is 3′ to the second element. For example, a SNP is downstream of a Cas9-induced nick site if the SNP is on the 3′ side of the nick site. The nucleic acid molecule can be a DNA (double or single stranded). RNA (double or single stranded), or a hybrid of DNA and RNA. The analysis is the same for single strand nucleic acid molecule and a double strand molecule since the terms upstream and downstream are in reference to only a single strand of a nucleic acid molecule, except that one needs to select which strand of the double stranded molecule is being considered. Often, the strand of a double stranded DNA which can be used to determine the positional relativity of at least two elements is the “sense” or “coding” strand. In genetics, a “sense” strand is the segment within double-stranded DNA that runs from 5′ to 3′, and which is complementary to the antisense strand of DNA, or template strand, which runs from 3′ to 5′. Thus, as an example, a SNP nucleobase is “downstream” of a promoter sequence in a genomic DNA (which is double-stranded) if the SNP nucleobase is on the 3′ side of the promoter on the sense or coding strand.

### Uracil Glycosylase Inhibitor

[0116] The term “uracil glycosylase inhibitor” or “UGI,” as used herein, refers to a protein that is capable of inhibiting a uracil-DNA glycosylase base-excision repair enzyme. In some embodiments, a UGI domain comprises a wild-type UGI or a UGI as set forth in SEQ ID NO: 41. In some embodiments, the UGI proteins described herein include fragments of UGI and proteins homologous to a UGI or a UGI fragment. For example, in some embodiments, a UGI domain comprises a fragment of the amino acid sequence set forth in SEQ ID NO: 41. In some embodiments, a UGI fragment comprises an amino acid sequence that comprises at least 60%, at least 65%, at least 70%, at least 75%, at least 80%, at least 85%, at least 90%, at least 95%, at least 96%, at least 97%, at least 98%, at least 99%, or at least 99.5% of the amino acid sequence as set forth in SEQ ID NO: 41. In some embodiments, a UGI comprises an amino acid sequence homologous to the amino acid sequence set forth in SEQ ID NO: 41, or an amino acid sequence homologous to a fragment of the amino acid sequence set forth in SEQ ID NO: 41. In some embodiments, proteins comprising UGI or fragments of UGI or homologs of UGI or UGI fragments are referred to as “UGI variants.” A UGI variant shares homology to UGI, or a fragment thereof. For example a UGI variant is at least 70% identical, at least 75% identical, at least 80% identical, at least 85% identical, at least 90% identical, at least 95% identical, at least 96% identical, at least 97% identical, at least 98% identical, at least 99% identical, at least 99.5% identical, or at least 99.9% identical to a wild type UGI or a UGI as set forth in SEQ ID NO: 41. In some embodiments, the UGI variant comprises a fragment of UGI, such that the fragment is at least 70% identical, at least 80% identical, at least 90% identical, at least 95% identical, at least 96% identical, at least 97% identical, at least 98% identical, at least 99% identical, at least 99.5% identical, or at least 99.9% to the corresponding fragment of wild-type UGI or a UGI as set forth in SEQ ID NO: 41. In some embodiments, the UGI comprises the following amino acid sequence: MTNLSDIIEKETGKQLVIQESILMLPEEVEEVIGNKPESDILVHTAYDESTDENVMLLT SDAPEYKPWALVIQDSNGENKIKML (SEQ ID NO: 41) (P14739IUNGIBPPB2 Uracil-DNA glycosylase inhibitor).

### Variant

[0117] As used herein, the term “variant” refers to a protein having characteristics that deviate from what occurs in nature that retains at least one functional i.e. binding, interaction, or enzymatic ability and/or therapeutic property thereof. A “variant” is at least about 70% identical, at least about 80% identical, at least about 90% identical, at least about 95% identical, at least about 96% identical, at least about 97% identical, at least about 98% identical, at least about 99% identical, at least about 99.5% identical, or at least about 99.9% identical to the wild type protein. For instance, a variant of Cas9 may comprise a Cas9 that has one or more changes in amino acid residues as compared to a wild type Cas9 amino acid sequence. As another example, a variant of a deaminase may comprise a deaminase that has one or more changes in amino acid residues as compared to a wild type deaminase amino acid sequence, e.g. following ancestral sequence reconstruction of the deaminase. These changes include chemical modifications, including substitutions of different amino acid residues truncations, covalent additions (e.g. of a tag), and any other mutations. The term also encompasses circular permutants, mutants, truncations, or domains of a reference sequence, and which display the same or substantially the same functional activity or activities as the reference sequence. This term also embraces fragments of a wild type protein.

[0118] The level or degree of which the property is retained may be reduced relative to the wild type protein but is typically the same or similar in kind. Generally, variants are overall very similar, and in many regions, identical to the amino acid sequence of the protein described herein. A skilled artisan will appreciate how to make and use variants that maintain all, or at least some, of a functional ability or property.

[0119] The variant proteins may comprise, or alternatively consist of, an amino acid sequence which is at least 80%, 85%, 90%, 95%, 96%, 97%, 98%, 99%, or 100%, identical to, for example, the amino acid sequence of a wild-type protein, or any protein provided herein.

[0120] By a polypeptide having an amino acid sequence at least, for example, 95% “identical” to a query amino acid sequence, it is intended that the amino acid sequence of the subject polypeptide is identical to the query sequence except that the subject polypeptide sequence may include up to five amino acid alterations per each 100 amino acids of the query amino acid sequence. In other words, to obtain a polypeptide having an amino acid sequence at least 95% identical to a query amino acid sequence, up to 5% of the amino acid residues in the subject sequence may be inserted, deleted, or substituted with another amino acid. These alterations of the reference sequence may occur at the amino- or carboxy-terminal positions of the reference amino acid sequence or anywhere between those terminal positions, interspersed either individually among residues in the reference sequence or in one or more contiguous groups within the reference sequence.

[0121] As a practical matter, whether any particular polypeptide is at least 80%, 85%, 90%, 95%, 96%, 97%, 98%, or 99% identical to, for instance, the amino acid sequence of a protein such as a Usherin protein, can be determined conventionally using known computer programs. A preferred method for determining the best overall match between a query sequence (a sequence of the present invention) and a subject sequence, also referred to as a global sequence alignment, can be determined using the FASTDB computer program based on the algorithm of Brutlag et al. (Comp. App. Biosci. 6:237-245 (1990)). In a sequence alignment the query and subject sequences are either both nucleotide sequences or both amino acid sequences. The result of said global sequence alignment is expressed as percent identity. Preferred parameters used in a FASTDB amino acid alignment are: Matrix=PAM 0, k-tuple=2, Mismatch Penalty=1, Joining Penalty=20, Randomization Group Length=0, Cutoff Score=1, Window Size=sequence length, Gap Penalty=5, Gap Size Penalty=0.05, Window Size=500 or the length of the subject amino acid sequence, whichever is shorter. If the subject sequence is shorter than the query sequence due to N- or C-terminal deletions, not because of internal deletions, a manual correction must be made to the results. This is because the FASTDB program does not account for N- and C-terminal truncations of the subject sequence when calculating global percent identity. For subject sequences truncated at the N- and C-termini, relative to the query sequence, the percent identity is corrected by calculating the number of residues of the query sequence that are N- and C-terminal of the subject sequence, which are not matched/aligned with a corresponding subject residue, as a percent of the total bases of the query sequence. Whether a residue is matched/aligned is determined by results of the FASTDB sequence alignment. This percentage is then subtracted from the percent identity, calculated by the above FASTDB program using the specified parameters, to arrive at a final percent identity score. This final percent identity score is what is used for the purposes of the present invention. Only residues to the N- and C-termini of the subject sequence, which are not matched/aligned with the query sequence, are considered for the purposes of manually adjusting the percent identity score. That is, only query residue positions outside the farthest N- and C-terminal residues of the subject sequence.

### Vector

[0122] The term “vector,” as used herein, refers to a nucleic acid that can be modified to encode a gene of interest and that is able to enter into a host cell and replicate within the host cell, and then transfer a replicated form of the vector into another host cell. Exemplary suitable vectors include viral vectors, such as AAV vectors or bacteriophages and filamentous phage, and conjugative plasmids. Additional suitable vectors will be apparent to those of skill in the art based on the present disclosure.

### Wild Type

[0123] As used herein the term “wild type” is a term of the art understood by skilled persons and means the typical form of an organism, strain, gene or characteristic as it occurs in nature as distinguished from mutant or variant forms.

[0124] These and other exemplary substituents are described in more detail in the Detailed Description, Examples, and claims. The invention is not intended to be limited in any manner by the above exemplary listing of substituents.

### Detailed Description of Certain Embodiments

[0125] The present disclosure provides compositions, vectors, kits, and methods for modifying a polynucleotide using base editing strategies that comprise the use of a nucleic acid programmable DNA binding protein (“napDNAbp”), a deaminase (e.g., cytidine or adenosine deaminase) and a suitable guide RNA that targets the USH2A gene in order to treat Usher syndrome (e.g., Usher syndrome, type 2A (or type IIA)) or retinitis pigmentosa. The disclosed methods may be used to treat any type of Usher syndrome, such as Usher syndrome type 1, type 2 and/or type 3. In various embodiments, the base editing is used to modify the nucleotide sequence of the USH2A gene such that USH2A protein function is restored, completely or partially. For example, in some embodiments base editing is used to restore US2HA function by disrupting a splice site (or pseudo-splice site) in the USH2A gene sequence to induce skipping of an exon containing a mutation. This approach is referred to herein as the “exon-skipping approach.” In other embodiments, base editing is used to restore US2HA function by correcting a point mutation (e.g., in an exon) so as to eliminate or reduce missense mutations, or eliminate or reduce nonsense mutations. This approach is referred to herein as the “mutation correction approach.” The presently disclosed compositions, kits, and methods make use of recently generated high-efficiency base editors such as BE4max, BE4max-VRQR, ABE7.10, and ABE8e, to install targeted edits in the USH2A gene with low frequency of off-target effects. The presently disclosed compositions, kits, and methods also make use of novel guide RNAs to program the base editor to the correct site in the USH2A gene. Several of thes guide RNAs are particularly useful for the exon-skipping approach, and several are particularly useful for the mutation-correction approach.

[0126] Mutations in USH2A are the most prevalent cause of Usher Syndrome (which may cause retinitis pigmentosa, visual loss, and/or hearing loss), with >1000 pathogenic mutations in USH2A reported in humans. Over 300 of these mutations are transition mutations, which may be corrected by base editing. Base editing at potentially therapeutically-relevant efficiencies in murine retina in vivo was recently demonstrated. (See Levy et al., Nat Biomed Eng. 2020 Jan; 4(1):97-110, herein incorporated by reference.) Therapeutic applications of base editing are constrained by the requirement for a protospacer-adjacent motif (PAM) recognition sequence, the potential generation of nearby bystander edits, and potential off-target effects. In cases where bioinformatic design criteria are met, empirical testing is then needed to identify gRNA sequence-base editor combinations with high on-target editing activity.

[0127] In the Examples of the present disclosure, a tandem array of 35 USH2A mutant sequences was integrated into the AAVS1 locus in HEK293 cells, allowing for rapid testing of base editor activity at these USH2A disease-associated mutations using a single cell line. These mutant sequences were selected based on bioinformatic design criteria and the prevalence of the mutations in humans. Using adenine base editors (ABEs) and cytidine base editors (CBEs), multiple mutations of USH2A were identified that showed high efficiency of base editing (>50%) with a low indel frequency (˜3%). Off-target effects at targeted editing sites were evaluated empirically for promising targets. There were specific (but limited) differences detected between various testing methods, including i) integrated editing target versus target plasmid transfection; ii) single-plex versus multiplex guide transfection; and iii) Sanger sequencing versus Illumina-based next-generation sequencing (NGS) editing efficacy evaluation. Testing of split-intein editors of the disclosed base editors that can be delivered by AAV in vivo is ongoing. The methods disclosed herein improve the rate and throughput with which promising base editor targets can be identified in cultured cells and in vivo.

[0128] In some embodiments, the disclosure provides guide sequences capable of directing base editors (e.g., adenosine base editors or cytidine base editors) to positions within the USH2A gene to correct mutations to treat Usher syndrome. In some embodiments, the disclosure provides guide sequences capable of directing base editors to splice sites of the USH2A gene to disrupt these splice sites to treat Usher syndrome. In some aspects, the disclosure provides proteins that deaminate the nucleobase adenine in the USH2A gene to treat Usher syndrome. In some aspects, the disclosure provides proteins that deaminate the nucleobase cytidine in an USH2A gene to treat Usher syndrome.

[0129] Also exemplified herein are cytosine base editors, which are capable of installing C-to-G edits. In some aspects, the disclosure provides proteins that deaminate the nucleobase cytosine in the USH2A gene to treat Usher syndrome.

[0130] Any base editors known in the art or to be developed in the future may be used in accordance with the present disclosure. Exemplified herein are adenosine base editors (i.e., capable of installing A-to-G edits, a type of transition edit) to account for a variety of genetic strategies that reduce or eliminate the expression of truncated Usherin (or USH2A) protein.

[0131] In some embodiments, the base editor nicks the target sequence that is complementary to the guide sequence. In some embodiments, the base editor may be formulated as a split-intein base editor.

[0132] This disclosure describes fusion proteins may be used for targeted editing of DNA in vitro, e.g., for the generation of mutant cells or animals; for the introduction of targeted mutations, e.g., for the correction of genetic defects in cells ex vivo, e.g., in cells obtained from a subject that are subsequently re-introduced into the same or another subject; and for the introduction of targeted mutations in vivo, e.g., the correction of genetic defects or the introduction of deactivating mutations in disease-associated genes in a subject, such as a mammalian subject. As an example, diseases and conditions can be treated by making an A to G, or a T to C mutation, may be treated using the base editors described herein. The base editors described herein may be utilized for the targeted editing of such G to A mutations so as to correct a mutation or restore a normal reading frame in an USH2A gene to generate a functional Usherin protein. The invention provides deaminase proteins, fusion proteins (base editors), nucleic acids, vectors; and cells, compositions, methods, kits, systems, etc. that utilize the disclosed deaminases, base editors, and vectors.

[0133] To bypass the packaging size limit and deliver base editors using AAVs, a split-base editor dual AAV strategy was devised, in which the CBE or ABE is divided into an N-terminal and C-terminal half. Each base editor half is fused to half of a fast-splicing split-intein. Following co-infection by AAV particles expressing each base editor—split intein half, protein splicing in trans reconstitutes full-length base editor. Unlike other approaches utilizing small molecules or sgRNA to bridge split Cas9, intein splicing removes all exogenous sequences and regenerates a native peptide bond at the split site, resulting in a single reconstituted protein identical in sequence to the unmodified base editor.

[0134] Split-intein CBEs and split-intein ABEs were developed and integrated into optimized dual AAV genomes to enable efficient base editing in somatic tissues of therapeutic relevance, including liver, heart, muscle, retina, and brain. The resulting AAVs were used to achieve base editing efficiencies at test loci for both CBEs and ABEs that, in each of these tissues, meets or exceeds therapeutically relevant editing thresholds for the treatment of some human genetic diseases at AAV dosages that are known to be well-tolerated in humans.

### USH2A and Usher Syndrome

[0135] Mutations in the USH2A gene are the most common cause of both non-syndromic retinal degeneration and Usher syndrome, affecting 1 in 6000 people. Patients with both conditions are affected with retinitis pigmentosa, characterized by onset of nyctalopia in teenage years, followed by progressive constriction of the visual field and eventually degradation of central vision. Patients with Usher syndrome also experience congenital, bilateral sensorineural hearing loss that occurs predominantly in the higher frequencies and ranges from severe to profound, resulting in a reduced ability of the individual to perceive, communicate, and extract vital information from their environment.

[0136] The protein encoded by the USH2A gene, Usherin, is a large transmembrane protein anchored in the plasma membrane of photoreceptors in the retina and in the hair cells of the cochlea. Its extracellular portion contains many repeated domains, including Laminin EGF-like (LE) domains and 35 Fibronectin type 3 (FN3) domains (FIG. 1A). Together, these repetitive domains comprise over 78% of the protein structure. Usherin is part of Usher protein complex II that is present in photoreceptor cells of the retina and hair cells of the inner ear. In the mouse retina, usherin is localized in the calycal processes of photoreceptor cells, which participates in regulating intracellular protein transport, and lasts for a life time. In mouse cochlear hair cells, usherin expression starts at embryonic stage E18 in the stereocilia bundle of hair cells, which is a highly specialized structure critical for transducing mechanical sound stimuli into electrical signals, and persists during early postnatal stages until approximately postnatal day 15. In addition, Usherin is detected in the synaptic regions of both cell types. Along with other USH2 complex proteins, Ush2a putatively participates in the differentiation of the stereocilia and the renewal of nascent outer segments. Ush2a knockout (KO) mice exhibit slowly progressive photoreceptor degeneration and defective stereocilia formation of hair cells of cochlear basal turn in neonates. Taken together, these indicate that usherin plays inherent role in maintaining the key functional and/or structural features shared between these two types of ciliated sensory neurons.

[0137] The human USH2A gene consists of 71 coding exons, 25 of which are in-frame with the remaining transcript (FIG. 1B). To date, over 1000 pathogenic USH2A mutations distributed throughout the genome have been identified, as reported in the Leiden Open Variation Database (LOVD) (http://www.lovd.nl). In particular, mutations in exon 13 account for approximately 35% of all USH2A cases, including a single base deletion at position 2299 (c.2299delG), the most common mutation in USH2A (FIG. 1C). This mutation creates a frameshift in the coding sequence, resulting in a premature stop codon in exon 13. This premature stop is predicted to lead to a null or a truncated, non-functional Usherin protein.

[0138] USH2A is one of the largest genes in the human genome, with about 800 kb of genomic sequence and 15.6 kb of coding sequence. This seriously hampers the possibility of traditional gene augmentation therapy, as it far exceeds the packaging capacity of standard gene therapy delivery vectors. In the past decade, alternative approaches for treating the mutations in large genes, such as anti-sense oligonucleotide-mediated splice correction, or the use of mini-gene, have been actively pursued with limited success. Recently, a novel strategy known as exon-skipping has shown great promise and has been successfully applied in pre-clinical and clinical studies to treat genetic diseases, such as Duchene Muscular Dystrophy (DMD), Huntington's diseases and CEP290-associated LCA. Exon-skipping approach is built upon the concept/prediction that when an mutant exon that is in-frame, or a pseudo-exon resulting from an aberrant splicing site in the introns, is excluded from the mRNA (“skipped”), the open reading frame of the remaining transcript is maintained or restored from frame-shifted mutant mRNA. Exon skipping can be achieved transiently at the mRNA level by antisense oligonucleotide (ASOs), RNAi, or CRISPR/Cas RNA editing. Exon skipping can also be attained permanently by directly altering the genomic DNA, for instance using programmable CRISPR genome editing to delete the target exons or disrupt the specific splicing sites of the target exons.

[0139] The usherin protein encoded by USH2A (GenBank Ace No. NC_000001.11, Reference GRCh38.p7 Primary Assembly, Range 215622894-216423396, complement; SEQ ID NO: 1) is a transmembrane protein anchored in the photoreceptor plasma membrane (van Wijk, E., et al., Am J Hum Genet, 2004. 74(4): 738-44; Grati, M., et al., J Neurosci, 2012. 32(41): p. 14288-93). Its extracellular portion, which accounts for over 96% of the length of the protein and projects into the periciliary matrix, is thought to have an important structural and a possible signaling role for the long-term maintenance of photoreceptors (van Wijk, 2012; Grati, M., 2012. 32(41): 14288-93). Two isoforms of USH2A have been described. Isoform b (GenBank Acc. No. NM_206933.2 (transcript) and NP 996816.2 (protein)) is most abundantly expressed in retina and is used as the canonical, standard sequence in the literature and in this disclosure. Usherin is a protein with a high degree of homologous domain structures (Liu, X., et al., Proc Natl Acad Sci USA, 2007. 104(11): 4413-18). Intracellularly, a PDZ domain has been identified to bind whirlin, whereas extracellularly, several domains are present and in most cases in a repetitive fashion, including Laminin EGF-like (LE) domains and Fibronectin type 3 (FN3) domains. These repetitive domains comprise over 78% of the protein structure combined. The most common mutation c.2299delG, p.G1u767fs in USH2A gene, which causes approximately 15-30% of USH2A-associated diseases is the United States, is located in exon 13 that encodes LE domain 5 (amino acids 747-794).

[0140] Given the high degree of repetitive regions in usherin, it has been hypothesized that an usherin protein that lacks one or more of the repetitive domains would retain partial or complete structural integrity and function, such that the abbreviated USH2A can serve as a therapeutic strategy for Usher syndrome type II and autosomal recessive retinitis pigmentosa (arRP) by skipping the mutant exon in USH2A gene. As described elsewhere, a mutant USH2A gene lacking exon 12, and with exons 11 and 13 fused in-frame, is expressed and localizes correctly in the mouse retina and cochlea. See International Publication No. WO 2019/0183641, published Jun. 20, 2019, herein incorporated by reference. CRISPR/Cas9-based exon-skipping gene editing strategies to restore the reading frame of USH2A by deleting exon 13 holds therapeutic potential for the treatment of USH2A patients.

[0141] Through a series of in vitro and in vivo experiments, it was shown that a mutant Ush2A protein that lacks repetitive LE domains encoded by mouse exon 12 (referred to as USH2A-ΔEx13 or Ush2a-ΔEx12) retains its biological function. See Pendse et al., “Exon 13-skipped USH2A protein retains functional integrity in mice, suggesting an exon-skipping therapeutic approach to treat USH2A-associated disease.” bioRxiv 2020.02.04.934240 (2020), herein incorporated by reference. Mouse exon 12 is homologous to human USH2A exon 13. The mutant Usherin protein was generated by CRISPR/Cas9-mediated clavage and knockout. This shortened version of USH2A-ΔEx13 was shown to be capable of rescuing the impaired ciliogenesis in an Ush2a null cell line. A single copy of Ush2a-ΔEx12 completely restored hair cell morphology and fully restored auditory function in the inner ear and mitigated early abnormalities in mouse retina. The proof-of-concept study of Pendse et al. demonstrated the substantial therapeutic potential of exon skipping therapies for the treatment of USH2A-associated disease caused by mutations in exon 13, which represents over one third of all USH2A cases. The exon-skipping approach of the base editing methods disclosed herein is based, at least in part, on this discovery.

[0142] Recently, Sanjurjo-Soriano and others demonstrated the feasibility of using CRISPR/eSpCas9-mediated genome editing to correct the two most prevalent USH2A mutations, c.2276G>T and c.2299delG, in induced pluripotent stem cells (iPSCs) of human patients. See Sanjurjo-Soriano et al., Molecular Therapy: Methods & Clinical Development Vol. 17 (Jun. 2020), incorporated herein by reference. This group generated the eSpCas9 variant by the introduction of several alanine substitutions in the wild-type protein sequence, which weaken the ionic interactions between the protein and the target DNA. These substitutions trap the eSp-Cas9 in an inactive state when it is bound to mismatched targets.

napDNAbp Domains

[0143] In one aspect, the editing methods and base editors described herein involve a nucleic acid programmable DNA binding protein (napDNAbp). Each napDNAbp is associated with at least one guide nucleic acid (e.g., guide RNA), which localizes the napDNAbp to a DNA sequence that comprises a DNA strand (i.e., a target strand) that is complementary to the guide nucleic acid, or a portion thereof (e.g., the protospacer of a guide RNA). In other words, the guide nucleic-acid “programs” the napDNAbp (e.g., Cas9 or equivalent) to localize and bind to a complementary sequence. In various embodiments, the napDNAbp can be fused to a herein disclosed adenosine deaminase.

[0144] Without being bound by theory, the binding mechanism of a napDNAbp — guide RNA complex, in general, includes the step of forming an R-loop whereby the napDNAbp induces the unwinding of a double-strand DNA target, thereby separating the strands in the region bound by the napDNAbp. The guide RNA spacer then hybridizes to the “target strand.” This displaces a “non-target strand” that is complementary to the target strand, which forms the single strand region of the R-loop. In some embodiments, the napDNAbp includes one or more nuclease activities, which then cut the DNA leaving various types of lesions. For example, the napDNAbp may comprises a nuclease activity that cuts the non-target strand at a first location, and/or cuts the target strand at a second location. Depending on the nuclease activity, the target DNA can be cut to form a “double-stranded break” whereby both strands are cut. In other embodiments, the target DNA can be cut at only a single site, i.e., the DNA is “nicked” on one strand. Exemplary napDNAbp with different nuclease activities include “Cas9 nickase” (“nCas9”) and a deactivated Cas9 having no nuclease activities (“dead Cas9” or “dCas9”).

[0145] The below description of various napDNAbps which can be used in connection with the presently disclose base editors is not meant to be limiting in any way. The base editors may comprise the canonical SpCas9, or any ortholog Cas9 protein, or any variant Cas9 protein—including any naturally occurring variant, mutant, or otherwise engineered version of Cas9—that is known or which can be made or evolved through a directed evolutionary or otherwise mutagenic process. In various embodiments, the Cas9 or Cas9 variants have a nickase activity, i.e., only cleave of strand of the target DNA sequence. In other embodiments, the Cas9 or Cas9 variants have inactive nucleases, i.e., are “dead” Cas9 proteins. Other variant Cas9 proteins that may be used are those having a smaller molecular weight than the canonical SpCas9 (e.g., for easier delivery) or having modified or rearranged primary amino acid structure (e.g., the circular permutant formats). The base editors described herein may also comprise Cas9 equivalents, including Cas12a/Cpf1 and Cas12b proteins which are the result of convergent evolution. The napDNAbps used herein (e.g., SpCas9, Cas9 variant, or Cas9 equivalents) may also may also contain various modifications that alter/enhance their PAM specificities. Lastly, the application contemplates any Cas9, Cas9 variant, or Cas9 equivalent which has at least 70%, at least 75%, at least 80%, at least 85%, at least 90%, at least 91%, at least 92%, at least 93%, at least 94%, at least 95%, at least 96%, at least 97%, at least 98%, at least 99%, or at least 99.9% sequence identity to a reference Cas9 sequence, such as a reference SpCas9 canonical sequence or a reference Cas9 equivalent (e.g., Cas12a/Cpf1).

[0146] The napDNAbp can be a CRISPR (clustered regularly interspaced short palindromic repeat)-associated nuclease. As outlined above, CRISPR is an adaptive immune system that provides protection against mobile genetic elements (viruses, transposable elements and conjugative plasmids). CRISPR clusters contain spacers, sequences complementary to antecedent mobile elements, and target invading nucleic acids. CRISPR clusters are transcribed and processed into CRISPR RNA (crRNA). In type II CRISPR systems correct processing of pre-crRNA requires a trans-encoded small RNA (tracrRNA), endogenous ribonuclease 3 (rnc) and a Cas9 protein. The tracrRNA serves as a guide for ribonuclease 3-aided processing of pre-crRNA. Subsequently, Cas9/crRNA/tracrRNA endonucleolytically cleaves linear or circular dsDNA target complementary to the spacer. The target strand not complementary to crRNA is first cut endonucleolytically, then trimmed 3′-5′ exonucleolytically. In nature, DNA-binding and cleavage typically requires protein and both RNAs. However, single guide RNAs (“sgRNA”, or simply “gRNA”) can be engineered so as to incorporate aspects of both the crRNA and tracrRNA into a single RNA species. See, e.g., Jinek M. et al., Science 337:816-821(2012), the entire contents of which is hereby incorporated by reference.

[0147] In some embodiments, the napDNAbp directs cleavage of one or both strands at the location of a target sequence, such as within the target sequence and/or within the complement of the target sequence. In some embodiments, the napDNAbp directs cleavage of one or both strands within about 1, 2, 3, 4, 5, 6, 7, 8, 9, 10, 15, 20, 25, 50, 100, 200, 500, or more base pairs from the first or last nucleotide of a target sequence. In some embodiments, a vector encodes a napDNAbp that is mutated to with respect to a corresponding wild-type enzyme such that the mutated napDNAbp lacks the ability to cleave one or both strands of a target polynucleotide containing a target sequence. For example, an aspartate-to-alanine substitution (D10A) in the RuvC I catalytic domain of Cas9 from S. pyogenes converts Cas9 from a nuclease that cleaves both strands to a nickase (cleaves a single strand). Other examples of mutations that render Cas9 a nickase include, without limitation, H840A, N854A, and N863A in reference to the canonical SpCas9 sequence, or to equivalent amino acid positions in other Cas9 variants or Cas9 equivalents.

[0148] As used herein, the term “Cas protein” refers to a full-length Cas protein obtained from nature, a recombinant Cas protein having a sequences that differs from a naturally occurring Cas protein, or any fragment of a Cas protein that nevertheless retains all or a significant amount of the requisite basic functions needed for the disclosed methods, i.e., (i) possession of nucleic-acid programmable binding of the Cas protein to a target DNA, and (ii) ability to nick the target DNA sequence on one strand. The Cas proteins contemplated herein embrace CRISPR Cas 9 proteins, as well as Cas9 equivalents, variants (e.g., Cas9 nickase (nCas9) or nuclease inactive Cas9 (dCas9)) homologs, orthologs, or paralogs, whether naturally occurring or non-naturally occurring (e.g., engineered or recombinant), and may include a Cas9 equivalent from any type of CRISPR system (e.g., type II, V, VI), including Cpf1 (a type-V CRISPR-Cas systems), C2c1 (a type V CRISPR-Cas system), C2c2 (a type VI CRISPR-Cas system) and C2c3 (a type V CRISPR-Cas system). Further Cas-equivalents are described in Makarova et al., “C2c2 is a single-component programmable RNA-guided RNA-targeting CRISPR effector,” Science 2016; 353(6299), the contents of which are incorporated herein by reference.

[0149] The terms “Cas9” or “Cas9 nuclease” or “Cas9 moiety” or “Cas9 domain” embrace any naturally occurring Cas9 from any organism, any naturally-occurring Cas9 equivalent or functional fragment thereof, any Cas9 homolog, ortholog, or paralog from any organism, and any mutant or variant of a Cas9, naturally-occurring or engineered. The term Cas9 is not meant to be particularly limiting and may be referred to as a “Cas9 or equivalent.” Exemplary Cas9 proteins are further described herein and/or are described in the art and are incorporated herein by reference. The present disclosure is unlimited with regard to the particular Cas9 that is employed in the base editor (BE) of the invention.

[0150] As noted herein, Cas9 nuclease sequences and structures are well known to those of skill in the art (see, e.g., “Complete genome sequence of an M1 strain of Streptococcus pyogenes.” Ferretti et al., J. J., McShan W. M., Ajdic D. J., Savic D. J., Savic G., Lyon K., Primeaux C., Sezate S., Suvorov A. N., Kenton S., Lai H. S., Lin S. P., Qian Y., Jia H. G., Najar F. Z., Ren Q., Zhu H., Song L., White J., Yuan X., Clifton S. W., Roe B. A., McLaughlin R. E., Proc. Natl. Acad. Sci. U.S.A. 98:4658-4663(2001); “CRISPR RNA maturation by trans-encoded small RNA and host factor RNase III.” Deltcheva E., Chylinski K., Sharma C. M., Gonzales K., Chao Y., Pirzada Z. A., Eckert M. R., Vogel J., Charpentier E., Nature 471:602-607(2011); and “A programmable dual-RNA-guided DNA endonuclease in adaptive bacterial immunity.” Jinek M., Chylinski K., Fonfara I., Hauer M., Doudna J.A., Charpentier E. Science 337:816-821(2012), the entire contents of each of which are incorporated herein by reference).

[0151] Examples of Cas9 and Cas9 equivalents are provided as follows; however, these specific examples are not meant to be limiting. The base editor fusions of the present disclosure may use any suitable napDNAbp, including any suitable Cas9 or Cas9 equivalent.

[0152] Exemplary napDNAbp domains include, but are not limited to S. pyogenes Cas9 nickase (SpCas9n) and S. aureus Cas9 nickase (SaCas9n). Wild-type SpCas9 and SaCas9 are also contemplated as exemplary napDNAbp domains. Additional exemplary napDNAbp domains include S. aureus Cas9-KKH (SaCas9-KKH), LbCas12a, enAsCas12a (an engineered AsCas12a recently reported by Joung et al.), SpCas9-NG, SpCas9-NG-CP1041, SpCas9-NG-VRQR, SpCas9-NG-VRQR, SpCas9-VRQR, SpCas9-NRCH, CP1028-SpCas9, and CP1041-SpCas9. In some embodiments, the napDNAbp domain comprises a Cas9 nickase (nCas9) domain. In some embodiments, the napDNAbp domain comprises an SpCas9n domain. In some embodiments, the napDNAbp domain is an SpCas9-VQR domain. In some embodiments, the napDNAbp domain is an SpCas9-VRQR or an SpCas9-VRER domain. In certain embodiments, the napDNAbp domain of any of the disclosed base editors is a SaCas9n.

[0153] In certain embodiments, the napDNAbp domain of any of the disclosed base editors is an SpCas9-NRCH. In certain embodiments, the napDNAbp domain of any of the disclosed base editors is an LbCas12a, e.g., a catalytically inactive or “dead” LbCas12a. In certain embodiments, the napDNAbp domain of any of the disclosed base editors is an AsCas12a, e.g., an enAsCas12a. In certain embodiments, the napDNAbp domain of any of the disclosed base editors is a cicular permuted variant of SpCas9, e.g., a CP1028-SpCas9 or a CP1041-SpCas9. In certain embodiments, the napDNAbp domain of any of the disclosed base editors is an evolved SpCas9, e.g., an SpCas9-NG. In certain embodiments, the napDNAbp domain of any of the disclosed base editors has an amino acid sequence that is at least 85%, 90%, 92.5%, 95%, 98%, or 99% identical to any one of SEQ ID NOs: 101, 102, 107, 118, 120, 133-134, 153-157, 171-175, 181, 182, and 436-437. In certain embodiments, the napDNAbp domain of any of the disclosed base editors comprises the amino acid sequence of any one of SEQ ID NOs: 101, 102, 107, 118, 120, 133-134, 153-157, 171-175, 181, 182, and 436-437.

[0154] In certain embodiments, the napDNAbp domain of any of the disclosed base editors comprises any one of Steptococcus cams Cas9 (ScCas9), St1Cas9, SpEQRCas9, and SpVRERCas9 (see WO 2019/217942, published Nov. 14, 2019, and WO 2019/217943, published Nov. 14, 2019, each of which is incorporated herein by reference). In certain embodiments, the napDNAbp domain of any of the disclosed base editors comprises a heterodimer of two Cas domains, such as dead Cas9 and nCas9 (see, e.g., WO 2020/051562, published Mar. 12, 2020, which is incorporated herein by reference).

### (i) Wild Type Canonical SpCas9

[0155] In one embodiment, the base editor constructs described herein may comprise the “canonical SpCas9” nuclease from S. pyogenes, which has been widely used as a tool for genome engineering. This Cas9 protein is a large, multi-domain protein containing two distinct nuclease domains. Point mutations can be introduced into Cas9 to abolish one or both nuclease activities, resulting in a nickase Cas9 (nCas9) or dead Cas9 (dCas9), respectively, that still retains its ability to bind DNA in a sgRNA-programmed manner. In principle, when fused to another protein or domain, Cas9 or variant thereof (e.g., nCas9) can target that protein to virtually any DNA sequence simply by co-expression with an appropriate sgRNA. As used herein, the canonical SpCas9 protein refers to the wild type protein from Streptococcus pyogenes having the following amino acid sequence:

| Description | Sequence | SEQ ID NO: |
|---|---|---|
| SpCas 9 | MDKKYSIGLDIGTNSVGWAVITDEYKVPSKKFKVLGNTDRHSIKKNLIGALLFDS | SEQ ID NO: 74 |
| Streptococcus | GETAEATRLKRTARRRYTRRKNRICYLQEIFSNEMAKVDDSFFHRLEESFLVEED | |
| pyogenes | KKHERHPIFGNIVDEVAYHEKYPTIYHLRKKLVDSTDKADLRLIYLALAHMIKFR | |
| M1 | GHFLIEGDLNPDNSDVDKLFIQLVQTYNQLFEENPINASGVDAKAILSARLSKSR | |
| SwissProt | RLENLIAQLPGEKKNGLFGNLIALSLGLTPNFKSNFDLAEDAKLQLSKDTYDDDL | |
| Accession | DNLLAQIGDQYADLFLAAKNLSDAILLSDILRVNTEITKAPLSASMIKRYDEHHQ | |
| No. Q99ZW2 | DLTLLKALVRQQLPEKYKEIFFDQSKNGYAGYIDGGASQEEFYKFIKPILEKMDG | |
| Wild type | TEELLVKLNREDLLRKQRTFDNGSIPHQIHLGELHAILRRQEDFYPFLKDNREKI | |
| | EKILTFRIPYYVGPLARGNSRFAWMTRKSEETITPWNFEEVVDKGASAQSFIERM | |
| | TNFDKNLPNEKVLPKHSLLYEYFTVYNELTKVKYVTEGMRKPAFLSGEQKKAIVD | |
| | LLFKTNRKVTVKQLKEDYFKKIECFDSVEISGVEDRFNASLGTYHDLLKIIKDKD | |
| | FLDNEENEDILEDIVLTLTLFEDREMIEERLKTYAHLFDDKVMKQLKRRRYTGWG | |
| | RLSRKLINGIRDKQSGKTILDFLKSDGFANRNFMQLIHDDSLTFKEDIQKAQVSG | |
| | QGDSLHEHIANLAGSPAIKKGILQTVKVVDELVKVMGRHKPENIVIEMARENQTT | |
| | QKGQKNSRERMKRIEEGIKELGSQILKEHPVENTQLQNEKLYLYYLQNGRDMYVD | |
| | QELDINRLSDYDVDHIVPQSFLKDDSIDNKVLTRSDKNRGKSDNVPSEEVVKKMK | |
| | NYWRQLLNAKLITQRKFDNLTKAERGGLSELDKAGFIKRQLVETRQITKHVAQIL | |
| | DSRMNTKYDENDKLIREVKVITLKSKLVSDFRKDFQFYKVREINNYHHAHDAYLN | |
| | AVVGTALIKKYPKLESEFVYGDYKVYDVRKMIAKSEQEIGKATAKYFFYSNIMNF | |
| | FKTEITLANGEIRKRPLIETNGETGEIVWDKGRDFATVRKVLSMPQVNIVKKTEV | |
| | QTGGFSKESILPKRNSDKLIARKKDWDPKKYGGFDSPTVAYSVLVVAKVEKGKSK | |
| | KLKSVKELLGITIMERSSFEKNPIDFLEAKGYKEVKKDLIIKLPKYSLFELENGR | |
| | KRMLASAGELQKGNELALPSKYVNFLYLASHYEKLKGSPEDNEQKQLFVEQHKHY | |
| | LDEIIEQISEFSKRVILADANLDKVLSAYNKHRDKPIREQAENIIHLFTLTNLGA | |
| | PAAFKYFDTTIDRKRYTSTKEVLDATLIHQSITGLYETRIDLSQLGGD | |
| SpCas 9 | ATGGATAAAAAATATAGCATTGGCCTGGATATTGGCACCAACAGCGTGGGCTGGG | SEQ ID NO: 75 |
| Reverse | CGGTGATTACCGATGAATATAAAGTGCCGAGCAAAAAATTTAAAGTGCTGGGCAA | |
| translation | CACCGATCGCCATAGCATTAAAAAAAACCTGATTGGCGCGCTGCTGTTTGATAGC | |
| of | GGCGAAACCGCGGAAGCGACCCGCCTGAAACGCACCGCGCGCCGCCGCTATACCC | |
| SwissProt | GCCGCAAAAACCGCATTTGCTATCTGCAGGAAATTTTTAGCAACGAAATGGCGAA | |
| Accession | AGTGGATGATAGCTTTTTTCATCGCCTGGAAGAAAGCTTTCTGGTGGAAGAAGAT | |
| No. Q99ZW2 | AAAAAACATGAACGCCATCCGATTTTTGGCAACATTGTGGATGAAGTGGCGTATC | |
| Streptococcus | ATGAAAAATATCCGACCATTTATCATCTGCGCAAAAAACTGGTGGATAGCACCGA | |
| pyogenes | TAAAGCGGATCTGCGCCTGATTTATCTGGCGCTGGCGCATATGATTAAATTTCGC | |
| | GGCCATTTTCTGATTGAAGGCGATCTGAACCCGGATAACAGCGATGTGGATAAAC | |
| | TGTTTATTCAGCTGGTGCAGACCTATAACCAGCTGTTTGAAGAAAACCCGATTAA | |
| | CGCGAGCGGCGTGGATGCGAAAGCGATTCTGAGCGCGCGCCTGAGCAAAAGCCGC | |
| | CGCCTGGAAAACCTGATTGCGCAGCTGCCGGGCGAAAAAAAAAACGGCCTGTTTG | |
| | GCAACCTGATTGCGCTGAGCCTGGGCCTGACCCCGAACTTTAAAAGCAACTTTGA | |
| | TCTGGCGGAAGATGCGAAACTGCAGCTGAGCAAAGATACCTATGATGATGATCTG | |
| | GATAACCTGCTGGCGCAGATTGGCGATCAGTATGCGGATCTGTTTCTGGCGGCGA | |
| | AAAACCTGAGCGATGCGATTCTGCTGAGCGATATTCTGCGCGTGAACACCGAAAT | |
| | TACCAAAGCGCCGCTGAGCGCGAGCATGATTAAACGCTATGATGAACATCATCAG | |
| | GATCTGACCCTGCTGAAAGCGCTGGTGCGCCAGCAGCTGCCGGAAAAATATAAAG | |
| | AAATTTTTTTTGATCAGAGCAAAAACGGCTATGCGGGCTATATTGATGGCGGCGC | |
| | GAGCCAGGAAGAATTTTATAAATTTATTAAACCGATTCTGGAAAAAATGGATGGC | |
| | ACCGAAGAACTGCTGGTGAAACTGAACCGCGAAGATCTGCTGCGCAAACAGCGCA | |
| | CCTTTGATAACGGCAGCATTCCGCATCAGATTCATCTGGGCGAACTGCATGCGAT | |
| | TCTGCGCCGCCAGGAAGATTTTTATCCGTTTCTGAAAGATAACCGCGAAAAAATT | |
| | GAAAAAATTCTGACCTTTCGCATTCCGTATTATGTGGGCCCGCTGGCGCGCGGCA | |
| | ACAGCCGCTTTGCGTGGATGACCCGCAAAAGCGAAGAAACCATTACCCCGTGGAA | |
| | CTTTGAAGAAGTGGTGGATAAAGGCGCGAGCGCGCAGAGCTTTATTGAACGCATG | |
| | ACCAACTTTGATAAAAACCTGCCGAACGAAAAAGTGCTGCCGAAACATAGCCTGC | |
| | TGTATGAATATTTTACCGTGTATAACGAACTGACCAAAGTGAAATATGTGACCGA | |
| | AGGCATGCGCAAACCGGCGTTTCTGAGCGGCGAACAGAAAAAAGCGATTGTGGAT | |
| | CTGCTGTTTAAAACCAACCGCAAAGTGACCGTGAAACAGCTGAAAGAAGATTATT | |
| | TTAAAAAAATTGAATGCTTTGATAGCGTGGAAATTAGCGGCGTGGAAGATCGCTT | |
| | TAACGCGAGCCTGGGCACCTATCATGATCTGCTGAAAATTATTAAAGATAAAGAT | |
| | TTTCTGGATAACGAAGAAAACGAAGATATTCTGGAAGATATTGTGCTGACCCTGA | |
| | CCCTGTTTGAAGATCGCGAAATGATTGAAGAACGCCTGAAAACCTATGCGCATCT | |
| | GTTTGATGATAAAGTGATGAAACAGCTGAAACGCCGCCGCTATACCGGCTGGGGC | |
| | CGCCTGAGCCGCAAACTGATTAACGGCATTCGCGATAAACAGAGCGGCAAAACCA | |
| | TTCTGGATTTTCTGAAAAGCGATGGCTTTGCGAACCGCAACTTTATGCAGCTGAT | |
| | TCATGATGATAGCCTGACCTTTAAAGAAGATATTCAGAAAGCGCAGGTGAGCGGC | |
| | CAGGGCGATAGCCTGCATGAACATATTGCGAACCTGGCGGGCAGCCCGGCGATTA | |
| | AAAAAGGCATTCTGCAGACCGTGAAAGTGGTGGATGAACTGGTGAAAGTGATGGG | |
| | CCGCCATAAACCGGAAAACATTGTGATTGAAATGGCGCGCGAAAACCAGACCACC | |
| | CAGAAAGGCCAGAAAAACAGCCGCGAACGCATGAAACGCATTGAAGAAGGCATTA | |
| | AAGAACTGGGCAGCCAGATTCTGAAAGAACATCCGGTGGAAAACACCCAGCTGCA | |
| | GAACGAAAAACTGTATCTGTATTATCTGCAGAACGGCCGCGATATGTATGTGGAT | |
| | CAGGAACTGGATATTAACCGCCTGAGCGATTATGATGTGGATCATATTGTGCCGC | |
| | AGAGCTTTCTGAAAGATGATAGCATTGATAACAAAGTGCTGACCCGCAGCGATAA | |
| | AAACCGCGGCAAAAGCGATAACGTGCCGAGCGAAGAAGTGGTGAAAAAAATGAAA | |
| | AACTATTGGCGCCAGCTGCTGAACGCGAAACTGATTACCCAGCGCAAATTTGATA | |
| | ACCTGACCAAAGCGGAACGCGGCGGCCTGAGCGAACTGGATAAAGCGGGCTTTAT | |
| | TAAACGCCAGCTGGTGGAAACCCGCCAGATTACCAAACATGTGGCGCAGATTCTG | |
| | GATAGCCGCATGAACACCAAATATGATGAAAACGATAAACTGATTCGCGAAGTGA | |
| | AAGTGATTACCCTGAAAAGCAAACTGGTGAGCGATTTTCGCAAAGATTTTCAGTT | |
| | TTATAAAGTGCGCGAAATTAACAACTATCATCATGCGCATGATGCGTATCTGAAC | |
| | GCGGTGGTGGGCACCGCGCTGATTAAAAAATATCCGAAACTGGAAAGCGAATTTG | |
| | TGTATGGCGATTATAAAGTGTATGATGTGCGCAAAATGATTGCGAAAAGCGAACA | |
| | GGAAATTGGCAAAGCGACCGCGAAATATTTTTTTTATAGCAACATTATGAACTTT | |
| | TTTAAAACCGAAATTACCCTGGCGAACGGCGAAATTCGCAAACGCCCGCTGATTG | |
| | AAACCAACGGCGAAACCGGCGAAATTGTGTGGGATAAAGGCCGCGATTTTGCGAC | |
| | CGTGCGCAAAGTGCTGAGCATGCCGCAGGTGAACATTGTGAAAAAAACCGAAGTG | |
| | CAGACCGGCGGCTTTAGCAAAGAAAGCATTCTGCCGAAACGCAACAGCGATAAAC | |
| | TGATTGCGCGCAAAAAAGATTGGGATCCGAAAAAATATGGCGGCTTTGATAGCCC | |
| | GACCGTGGCGTATAGCGTGCTGGTGGTGGCGAAAGTGGAAAAAGGCAAAAGCAAA | |
| | AAACTGAAAAGCGTGAAAGAACTGCTGGGCATTACCATTATGGAACGCAGCAGCT | |
| | TTGAAAAAAACCCGATTGATTTTCTGGAAGCGAAAGGCTATAAAGAAGTGAAAAA | |
| | AGATCTGATTATTAAACTGCCGAAATATAGCCTGTTTGAACTGGAAAACGGCCGC | |
| | AAACGCATGCTGGCGAGCGCGGGCGAACTGCAGAAAGGCAACGAACTGGCGCTGC | |
| | CGAGCAAATATGTGAACTTTCTGTATCTGGCGAGCCATTATGAAAAACTGAAAGG | |
| | CAGCCCGGAAGATAACGAACAGAAACAGCTGTTTGTGGAACAGCATAAACATTAT | |
| | CTGGATGAAATTATTGAACAGATTAGCGAATTTAGCAAACGCGTGATTCTGGCGG | |
| | ATGCGAACCTGGATAAAGTGCTGAGCGCGTATAACAAACATCGCGATAAACCGAT | |
| | TCGCGAACAGGCGGAAAACATTATTCATCTGTTTACCCTGACCAACCTGGGCGCG | |
| | CCGGCGGCGTTTAAATATTTTGATACCACCATTGATCGCAAACGCTATACCAGCA | |
| | CCAAAGAAGTGCTGGATGCGACCCTGATTCATCAGAGCATTACCGGCCTGTATGA | |
| | AACCCGCATTGATCTGAGCCAGCTGGGCGGCGAT | |

[0156] The base editors described herein may include canonical SpCas9, or any variant thereof having at least 80%, at least 85%, at least 90%, at least 95%, or at least 99% sequence identity with a wild type Cas9 sequence provided above. These variants may include SpCas9 variants containing one or more mutations, including any known mutation reported with the SwissProt Accession No. Q99ZW2 entry, which include:

| SpCas9 mutation (relative | Function/Characteristic (as reported) |
|---|---|
| to the amino acid sequence | (see UniProtKB—Q99ZW2 |
| of the canonical SpCas9 | (CAS9_STRPT1) entry— |
| sequence, SEQ ID NO: 74) | incorporated herein by reference) |
| D10A | Nickase mutant which cleaves the |
| | protospacer strand (but no cleavage |
| | of non-protospacer strand) |
| S15A | Decreased DNA cleavage activity |
| R66A | Decreased DNA cleavage activity |
| R70A | No DNA cleavage |
| R74A | Decreased DNA cleavage |
| R78A | Decreased DNA cleavage |
| 97-150 deletion | No nuclease activity |
| R165A | Decreased DNA cleavage |
| 175-307 deletion | About 50% decreased DNA cleavage |
| 312-409 deletion | No nuclease activity |
| E762A | Nickase |
| H840A | Nickase mutant which cleaves the |
| | non-protospacer strand but does not |
| | cleave the protospacer strand |
| N854A | Nickase |
| N863A | Nickase |
| H982A | Decreased DNA cleavage |
| D986A | Nickase |
| 1099-1368 deletion | No nuclease activity |
| R1333A | Reduced DNA binding |

[0157] Other wild type SpCas9 sequences that may be used in the present disclosure, include:

| Description | Sequence | SEQ ID NO: |
|---|---|---|
| SpCas9 | ATGGATAAGAAATACTCAATAGGCTTAGATATCGGCACAAATAGCGTCGGATGGGCG | SEQ ID NO: 76 |
| Streptococcus | GTGATCACTGATGATTATAAGGTTCCGTCTAAAAAGTTCAAGGTTCTGGGAAATACA | |
| pyogenes | GACCGCCACAGTATCAAAAAAAATCTTATAGGGGCTCTTTTATTTGGCAGTGGAGAG | |
| MGAS1882 | ACAGCGGAAGCGACTCGTCTCAAACGGACAGCTCGTAGAAGGTATACACGTCGGAAG | |
| wild type | AATCGTATTTGTTATCTACAGGAGATTTTTTCAAATGAGATGGCGAAAGTAGATGAT | |
| NC_017053.1 | AGTTTCTTTCATCGACTTGAAGAGTCTTTTTTGGTGGAAGAAGACAAGAAGCATGAA | |
| | CGTCATCCTATTTTTGGAAATATAGTAGATGAAGTTGCTTATCATGAGAAATATCCA | |
| | ACTATCTATCATCTGCGAAAAAAATTGGCAGATTCTACTGATAAAGCGGATTTGCGC | |
| | TTAATCTATTTGGCCTTAGCGCATATGATTAAGTTTCGTGGTCATTTTTTGATTGAG | |
| | GGAGATTTAAATCCTGATAATAGTGATGTGGACAAACTATTTATCCAGTTGGTACAA | |
| | ATCTACAATCAATTATTTGAAGAAAACCCTATTAACGCAAGTAGAGTAGATGCTAAA | |
| | GCGATTCTTTCTGCACGATTGAGTAAATCAAGACGATTAGAAAATCTCATTGCTCAG | |
| | CTCCCCGGTGAGAAGAGAAATGGCTTGTTTGGGAATCTCATTGCTTTGTCATTGGGA | |
| | TTGACCCCTAATTTTAAATCAAATTTTGATTTGGCAGAAGATGCTAAATTACAGCTT | |
| | TCAAAAGATACTTACGATGATGATTTAGATAATTTATTGGCGCAAATTGGAGATCAA | |
| | TATGCTGATTTGTTTTTGGCAGCTAAGAATTTATCAGATGCTATTTTACTTTCAGAT | |
| | ATCCTAAGAGTAAATAGTGAAATAACTAAGGCTCCCCTATCAGCTTCAATGATTAAG | |
| | CGCTACGATGAACATCATCAAGACTTGACTCTTTTAAAAGCTTTAGTTCGACAACAA | |
| | CTTCCAGAAAAGTATAAAGAAATCTTTTTTGATCAATCAAAAAACGGATATGCAGGT | |
| | TATATTGATGGGGGAGCTAGCCAAGAAGAATTTTATAAATTTATCAAACCAATTTTA | |
| | GAAAAAATGGATGGTACTGAGGAATTATTGGTGAAACTAAATCGTGAAGATTTGCTG | |
| | CGCAAGCAACGGACCTTTGACAACGGCTCTATTCCCCATCAAATTCACTTGGGTGAG | |
| | CTGCATGCTATTTTGAGAAGACAAGAAGACTTTTATCCATTTTTAAAAGACAATCGT | |
| | GAGAAGATTGAAAAAATCTTGACTTTTCGAATTCCTTATTATGTTGGTCCATTGGCG | |
| | CGTGGCAATAGTCGTTTTGCATGGATGACTCGGAAGTCTGAAGAAACAATTACCCCA | |
| | TGGAATTTTGAAGAAGTTGTCGATAAAGGTGCTTCAGCTCAATCATTTATTGAACGC | |
| | ATGACAAACTTTGATAAAAATCTTCCAAATGAAAAAGTACTACCAAAACATAGTTTG | |
| | CTTTATGAGTATTTTACGGTTTATAACGAATTGACAAAGGTCAAATATGTTACTGAG | |
| | GGAATGCGAAAACCAGCATTTCTTTCAGGTGAACAGAAGAAAGCCATTGTTGATTTA | |
| | CTCTTCAAAACAAATCGAAAAGTAACCGTTAAGCAATTAAAAGAAGATTATTTCAAA | |
| | AAAATAGAATGTTTTGATAGTGTTGAAATTTCAGGAGTTGAAGATAGATTTAATGCT | |
| | TCATTAGGCGCCTACCATGATTTGCTAAAAATTATTAAAGATAAAGATTTTTTGGAT | |
| | AATGAAGAAAATGAAGATATCTTAGAGGATATTGTTTTAACATTGACCTTATTTGAA | |
| | GATAGGGGGATGATTGAGGAAAGACTTAAAACATATGCTCACCTCTTTGATGATAAG | |
| | GTGATGAAACAGCTTAAACGTCGCCGTTATACTGGTTGGGGACGTTTGTCTCGAAAA | |
| | TTGATTAATGGTATTAGGGATAAGCAATCTGGCAAAACAATATTAGATTTTTTGAAA | |
| | TCAGATGGTTTTGCCAATCGCAATTTTATGCAGCTGATCCATGATGATAGTTTGACA | |
| | TTTAAAGAAGATATTCAAAAAGCACAGGTGTCTGGACAAGGCCATAGTTTACATGAA | |
| | CAGATTGCTAACTTAGCTGGCAGTCCTGCTATTAAAAAAGGTATTTTACAGACTGTA | |
| | AAAATTGTTGATGAACTGGTCAAAGTAATGGGGCATAAGCCAGAAAATATCGTTATT | |
| | GAAATGGCACGTGAAAATCAGACAACTCAAAAGGGCCAGAAAAATTCGCGAGAGCGT | |
| | ATGAAACGAATCGAAGAAGGTATCAAAGAATTAGGAAGTCAGATTCTTAAAGAGCAT | |
| | CCTGTTGAAAATACTCAATTGCAAAATGAAAAGCTCTATCTCTATTATCTACAAAAT | |
| | GGAAGAGACATGTATGTGGACCAAGAATTAGATATTAATCGTTTAAGTGATTATGAT | |
| | GTCGATCACATTGTTCCACAAAGTTTCATTAAAGACGATTCAATAGACAATAAGGTA | |
| | CTAACGCGTTCTGATAAAAATCGTGGTAAATCGGATAACGTTCCAAGTGAAGAAGTA | |
| | GTCAAAAAGATGAAAAACTATTGGAGACAACTTCTAAACGCCAAGTTAATCACTCAA | |
| | CGTAAGTTTGATAATTTAACGAAAGCTGAACGTGGAGGTTTGAGTGAACTTGATAAA | |
| | GCTGGTTTTATCAAACGCCAATTGGTTGAAACTCGCCAAATCACTAAGCATGTGGCA | |
| | CAAATTTTGGATAGTCGCATGAATACTAAATACGATGAAAATGATAAACTTATTCGA | |
| | GAGGTTAAAGTGATTACCTTAAAATCTAAATTAGTTTCTGACTTCCGAAAAGATTTC | |
| | CAATTCTATAAAGTACGTGAGATTAACAATTACCATCATGCCCATGATGCGTATCTA | |
| | AATGCCGTCGTTGGAACTGCTTTGATTAAGAAATATCCAAAACTTGAATCGGAGTTT | |
| | GTCTATGGTGATTATAAAGTTTATGATGTTCGTAAAATGATTGCTAAGTCTGAGCAA | |
| | GAAATAGGCAAAGCAACCGCAAAATATTTCTTTTACTCTAATATCATGAACTTCTTC | |
| | AAAACAGAAATTACACTTGCAAATGGAGAGATTCGCAAACGCCCTCTAATCGAAACT | |
| | AATGGGGAAACTGGAGAAATTGTCTGGGATAAAGGGCGAGATTTTGCCACAGTGCGC | |
| | AAAGTATTGTCCATGCCCCAAGTCAATATTGTCAAGAAAACAGAAGTACAGACAGGC | |
| | GGATTCTCCAAGGAGTCAATTTTACCAAAAAGAAATTCGGACAAGCTTATTGCTCGT | |
| | AAAAAAGACTGGGATCCAAAAAAATATGGTGGTTTTGATAGTCCAACGGTAGCTTAT | |
| | TCAGTCCTAGTGGTTGCTAAGGTGGAAAAAGGGAAATCGAAGAAGTTAAAATCCGTT | |
| | AAAGAGTTACTAGGGATCACAATTATGGAAAGAAGTTCCTTTGAAAAAAATCCGATT | |
| | GACTTTTTAGAAGCTAAAGGATATAAGGAAGTTAAAAAAGACTTAATCATTAAACTA | |
| | CCTAAATATAGTCTTTTTGAGTTAGAAAACGGTCGTAAACGGATGCTGGCTAGTGCC | |
| | GGAGAATTACAAAAAGGAAATGAGCTGGCTCTGCCAAGCAAATATGTGAATTTTTTA | |
| | TATTTAGCTAGTCATTATGAAAAGTTGAAGGGTAGTCCAGAAGATAACGAACAAAAA | |
| | CAATTGTTTGTGGAGCAGCATAAGCATTATTTAGATGAGATTATTGAGCAAATCAGT | |
| | GAATTTTCTAAGCGTGTTATTTTAGCAGATGCCAATTTAGATAAAGTTCTTAGTGCA | |
| | TATAACAAACATAGAGACAAACCAATACGTGAACAAGCAGAAAATATTATTCATTTA | |
| | TTTACGTTGACGAATCTTGGAGCTCCCGCTGCTTTTAAATATTTTGATACAACAATT | |
| | GATCGTAAACGATATACGTCTACAAAAGAAGTTTTAGATGCCACTCTTATCCATCAA | |
| | TCCATCACTGGTCTTTATGAAACACGCATTGATTTGAGTCAGCTAGGAGGTGACTGA | |
| SpCas9 | MDKKYSIGLDIGTNSVGWAVITDDYKVPSKKFKVLGNTDRHSIKKNLIGALLFGSGE | SEQ ID NO: 77 |
| Streptococcus | TAEATRLKRTARRRYTRRKNRICYLQEIFSNEMAKVDDSFFHRLEESFLVEEDKKHE | |
| pyogenes | RHPIFGNIVDEVAYHEKYPTIYHLRKKLADSTDKADLRLIYLALAHMIKFRGHFLIE | |
| MGAS1882 | GDLNPDNSDVDKLFIQLVQIYNQLFEENPINASRVDAKAILSARLSKSRRLENLIAQ | |
| wild type | LPGEKRNGLFGNLIALSLGLTPNFKSNFDLAEDAKLQLSKDTYDDDLDNLLAQIGDQ | |
| NC_017053.1 | YADLFLAAKNLSDAILLSDILRVNSEITKAPLSASMIKRYDEHHQDLTLLKALVRQQ | |
| | LPEKYKEIFFDQSKNGYAGYIDGGASQEEFYKFIKPILEKMDGTEELLVKLNREDLL | |
| | RKQRTFDNGSIPHQIHLGELHAILRRQEDFYPFLKDNREKIEKILTFRIPYYVGPLA | |
| | RGNSRFAWMTRKSEETITPWNFEEVVDKGASAQSFIERMTNFDKNLPNEKVLPKHSL | |
| | LYEYFTVYNELTKVKYVTEGMRKPAFLSGEQKKAIVDLLFKTNRKVTVKQLKEDYFK | |
| | KIECFDSVEISGVEDRFNASLGAYHDLLKIIKDKDFLDNEENEDILEDIVLTLTLFE | |
| | DRGMIEERLKTYAHLFDDKVMKQLKRRRYTGWGRLSRKLINGIRDKQSGKTILDFLK | |
| | SDGFANRNFMQLIHDDSLTFKEDIQKAQVSGQGHSLHEQIANLAGSPAIKKGILQTV | |
| | KIVDELVKVMGHKPENIVIEMARENQTTQKGQKNSRERMKRIEEGIKELGSQILKEH | |
| | PVENTQLQNEKLYLYYLQNGRDMYVDQELDINRLSDYDVDHIVPQSFIKDDSIDNKV | |
| | LTRSDKNRGKSDNVPSEEVVKKMKNYWRQLLNAKLITQRKFDNLTKAERGGLSELDK | |
| | AGFIKRQLVETRQITKHVAQILDSRMNTKYDENDKLIREVKVITLKSKLVSDFRKDF | |
| | QFYKVREINNYHHAHDAYLNAVVGTALIKKYPKLESEFVYGDYKVYDVRKMIAKSEQ | |
| | EIGKATAKYFFYSNIMNFFKTEITLANGEIRKRPLIETNGETGEIVWDKGRDFATVR | |
| | KVLSMPQVNIVKKTEVQTGGFSKESILPKRNSDKLIARKKDWDPKKYGGFDSPTVAY | |
| | SVLVVAKVEKGKSKKLKSVKELLGITIMERSSFEKNPIDFLEAKGYKEVKKDLIIKL | |
| | PKYSLFELENGRKRMLASAGELQKGNELALPSKYVNFLYLASHYEKLKGSPEDNEQK | |
| | QLFVEQHKHYLDEIIEQISEFSKRVILADANLDKVLSAYNKHRDKPIREQAENIIHL | |
| | FTLTNLGAPAAFKYFDTTIDRKRYTSTKEVLDATLIHQSITGLYETRIDLSQLGGD | |
| SpCas9 | ATGGATAAAAAGTATTCTATTGGTTTAGACATCGGCACTAATTCCGTTGGATGGGCT | SEQ ID NO: 78 |
| Streptococcus | GTCATAACCGATGAATACAAAGTACCTTCAAAGAAATTTAAGGTGTTGGGGAACACA | |
| pyogenes | GACCGTCATTCGATTAAAAAGAATCTTATCGGTGCCCTCCTATTCGATAGTGGCGAA | |
| wild type | ACGGCAGAGGCGACTCGCCTGAAACGAACCGCTCGGAGAAGGTATACACGTCGCAAG | |
| SWBC2D7W014 | AACCGAATATGTTACTTACAAGAAATTTTTAGCAATGAGATGGCCAAAGTTGACGAT | |
| | TCTTTCTTTCACCGTTTGGAAGAGTCCTTCCTTGTCGAAGAGGACAAGAAACATGAA | |
| | CGGCACCCCATCTTTGGAAACATAGTAGATGAGGTGGCATATCATGAAAAGTACCCA | |
| | ACGATTTATCACCTCAGAAAAAAGCTAGTTGACTCAACTGATAAAGCGGACCTGAGG | |
| | TTAATCTACTTGGCTCTTGCCCATATGATAAAGTTCCGTGGGCACTTTCTCATTGAG | |
| | GGTGATCTAAATCCGGACAACTCGGATGTCGACAAACTGTTCATCCAGTTAGTACAA | |
| | ACCTATAATCAGTTGTTTGAAGAGAACCCTATAAATGCAAGTGGCGTGGATGCGAAG | |
| | GCTATTCTTAGCGCCCGCCTCTCTAAATCCCGACGGCTAGAAAACCTGATCGCACAA | |
| | TTACCCGGAGAGAAGAAAAATGGGTTGTTCGGTAACCTTATAGCGCTCTCACTAGGC | |
| | CTGACACCAAATTTTAAGTCGAACTTCGACTTAGCTGAAGATGCCAAATTGCAGCTT | |
| | AGTAAGGACACGTACGATGACGATCTCGACAATCTACTGGCACAAATTGGAGATCAG | |
| | TATGCGGACTTATTTTTGGCTGCCAAAAACCTTAGCGATGCAATCCTCCTATCTGAC | |
| | ATACTGAGAGTTAATACTGAGATTACCAAGGCGCCGTTATCCGCTTCAATGATCAAA | |
| | AGGTACGATGAACATCACCAAGACTTGACACTTCTCAAGGCCCTAGTCCGTCAGCAA | |
| | CTGCCTGAGAAATATAAGGAAATATTCTTTGATCAGTCGAAAAACGGGTACGCAGGT | |
| | TATATTGACGGCGGAGCGAGTCAAGAGGAATTCTACAAGTTTATCAAACCCATATTA | |
| | GAGAAGATGGATGGGACGGAAGAGTTGCTTGTAAAACTCAATCGCGAAGATCTACTG | |
| | CGAAAGCAGCGGACTTTCGACAACGGTAGCATTCCACATCAAATCCACTTAGGCGAA | |
| | TTGCATGCTATACTTAGAAGGCAGGAGGATTTTTATCCGTTCCTCAAAGACAATCGT | |
| | GAAAAGATTGAGAAAATCCTAACCTTTCGCATACCTTACTATGTGGGACCCCTGGCC | |
| | CGAGGGAACTCTCGGTTCGCATGGATGACAAGAAAGTCCGAAGAAACGATTACTCCA | |
| | TGGAATTTTGAGGAAGTTGTCGATAAAGGTGCGTCAGCTCAATCGTTCATCGAGAGG | |
| | ATGACCAACTTTGACAAGAATTTACCGAACGAAAAAGTATTGCCTAAGCACAGTTTA | |
| | CTTTACGAGTATTTCACAGTGTACAATGAACTCACGAAAGTTAAGTATGTCACTGAG | |
| | GGCATGCGTAAACCCGCCTTTCTAAGCGGAGAACAGAAGAAAGCAATAGTAGATCTG | |
| | TTATTCAAGACCAACCGCAAAGTGACAGTTAAGCAATTGAAAGAGGACTACTTTAAG | |
| | AAAATTGAATGCTTCGATTCTGTCGAGATCTCCGGGGTAGAAGATCGATTTAATGCG | |
| | TCACTTGGTACGTATCATGACCTCCTAAAGATAATTAAAGATAAGGACTTCCTGGAT | |
| | AACGAAGAGAATGAAGATATCTTAGAAGATATAGTGTTGACTCTTACCCTCTTTGAA | |
| | GATCGGGAAATGATTGAGGAAAGACTAAAAACATACGCTCACCTGTTCGACGATAAG | |
| | GTTATGAAACAGTTAAAGAGGCGTCGCTATACGGGCTGGGGACGATTGTCGCGGAAA | |
| | CTTATCAACGGGATAAGAGACAAGCAAAGTGGTAAAACTATTCTCGATTTTCTAAAG | |
| | AGCGACGGCTTCGCCAATAGGAACTTTATGCAGCTGATCCATGATGACTCTTTAACC | |
| | TTCAAAGAGGATATACAAAAGGCACAGGTTTCCGGACAAGGGGACTCATTGCACGAA | |
| | CATATTGCGAATCTTGCTGGTTCGCCAGCCATCAAAAAGGGCATACTCCAGACAGTC | |
| | AAAGTAGTGGATGAGCTAGTTAAGGTCATGGGACGTCACAAACCGGAAAACATTGTA | |
| | ATCGAGATGGCACGCGAAAATCAAACGACTCAGAAGGGGCAAAAAAACAGTCGAGAG | |
| | CGGATGAAGAGAATAGAAGAGGGTATTAAAGAACTGGGCAGCCAGATCTTAAAGGAG | |
| | CATCCTGTGGAAAATACCCAATTGCAGAACGAGAAACTTTACCTCTATTACCTACAA | |
| | AATGGAAGGGACATGTATGTTGATCAGGAACTGGACATAAACCGTTTATCTGATTAC | |
| | GACGTCGATCACATTGTACCCCAATCCTTTTTGAAGGACGATTCAATCGACAATAAA | |
| | GTGCTTACACGCTCGGATAAGAACCGAGGGAAAAGTGACAATGTTCCAAGCGAGGAA | |
| | GTCGTAAAGAAAATGAAGAACTATTGGCGGCAGCTCCTAAATGCGAAACTGATAACG | |
| | CAAAGAAAGTTCGATAACTTAACTAAAGCTGAGAGGGGTGGCTTGTCTGAACTTGAC | |
| | AAGGCCGGATTTATTAAACGTCAGCTCGTGGAAACCCGCCAAATCACAAAGCATGTT | |
| | GCACAGATACTAGATTCCCGAATGAATACGAAATACGACGAGAACGATAAGCTGATT | |
| | CGGGAAGTCAAAGTAATCACTTTAAAGTCAAAATTGGTGTCGGACTTCAGAAAGGAT | |
| | TTTCAATTCTATAAAGTTAGGGAGATAAATAACTACCACCATGCGCACGACGCTTAT | |
| | CTTAATGCCGTCGTAGGGACCGCACTCATTAAGAAATACCCGAAGCTAGAAAGTGAG | |
| | TTTGTGTATGGTGATTACAAAGTTTATGACGTCCGTAAGATGATCGCGAAAAGCGAA | |
| | CAGGAGATAGGCAAGGCTACAGCCAAATACTTCTTTTATTCTAACATTATGAATTTC | |
| | TTTAAGACGGAAATCACTCTGGCAAACGGAGAGATACGCAAACGACCTTTAATTGAA | |
| | ACCAATGGGGAGACAGGTGAAATCGTATGGGATAAGGGCCGGGACTTCGCGACGGTG | |
| | AGAAAAGTTTTGTCCATGCCCCAAGTCAACATAGTAAAGAAAACTGAGGTGCAGACC | |
| | GGAGGGTTTTCAAAGGAATCGATTCTTCCAAAAAGGAATAGTGATAAGCTCATCGCT | |
| | CGTAAAAAGGACTGGGACCCGAAAAAGTACGGTGGCTTCGATAGCCCTACAGTTGCC | |
| | TATTCTGTCCTAGTAGTGGCAAAAGTTGAGAAGGGAAAATCCAAGAAACTGAAGTCA | |
| | GTCAAAGAATTATTGGGGATAACGATTATGGAGCGCTCGTCTTTTGAAAAGAACCCC | |
| | ATCGACTTCCTTGAGGCGAAAGGTTACAAGGAAGTAAAAAAGGATCTCATAATTAAA | |
| | CTACCAAAGTATAGTCTGTTTGAGTTAGAAAATGGCCGAAAACGGATGTTGGCTAGC | |
| | GCCGGAGAGCTTCAAAAGGGGAACGAACTCGCACTACCGTCTAAATACGTGAATTTC | |
| | CTGTATTTAGCGTCCCATTACGAGAAGTTGAAAGGTTCACCTGAAGATAACGAACAG | |
| | AAGCAACTTTTTGTTGAGCAGCACAAACATTATCTCGACGAAATCATAGAGCAAATT | |
| | TCGGAATTCAGTAAGAGAGTCATCCTAGCTGATGCCAATCTGGACAAAGTATTAAGC | |
| | GCATACAACAAGCACAGGGATAAACCCATACGTGAGCAGGCGGAAAATATTATCCAT | |
| | TTGTTTACTCTTACCAACCTCGGCGCTCCAGCCGCATTCAAGTATTTTGACACAACG | |
| | ATAGATCGCAAACGATACACTTCTACCAAGGAGGTGCTAGACGCGACACTGATTCAC | |
| | CAATCCATCACGGGATTATATGAAACTCGGATAGATTTGTCACAGCTTGGGGGTGAC | |
| | GGATCCCCCAAGAAGAAGAGGAAAGTCTCGAGCGACTACAAAGACCATGACGGTGAT | |
| | TATAAAGATCATGACATCGATTACAAGGATGACGATGACAAGGCTGCAGGA | |
| SpCas9 | MDKKYSIGLDIGTNSVGWAVITDEYKVPSKKFKVLGNTDRHSIKKNLIGALLFDSGE | SEQ ID NO: 79 |
| Streptococcus | TAEATRLKRTARRRYTRRKNRICYLQEIFSNEMAKVDDSFFHRLEESFLVEEDKKHE | |
| pyogenes | RHPIFGNIVDEVAYHEKYPTIYHLRKKLVDSTDKADLRLIYLALAHMIKFRGHFLIE | |
| wild type | GDLNPDNSDVDKLFIQLVQTYNQLFEENPINASGVDAKAILSARLSKSRRLENLIAQ | |
| Encoded | LPGEKKNGLFGNLIALSLGLTPNFKSNFDLAEDAKLQLSKDTYDDDLDNLLAQIGDQ | |
| product of | YADLFLAAKNLSDAILLSDILRVNTEITKAPLSASMIKRYDEHHQDLTLLKALVRQQ | |
| SWBC2D7W014 | LPEKYKEIFFDQSKNGYAGYIDGGASQEEFYKFIKPILEKMDGTEELLVKLNREDLL | |
| | RKQRTFDNGSIPHQIHLGELHAILRRQEDFYPFLKDNREKIEKILTFRIPYYVGPLA | |
| | RGNSRFAWMTRKSEETITPWNFEEVVDKGASAQSFIERMTNFDKNLPNEKVLPKHSL | |
| | LYEYFTVYNELTKVKYVTEGMRKPAFLSGEQKKAIVDLLFKTNRKVTVKQLKEDYFK | |
| | KIECFDSVEISGVEDRFNASLGTYHDLLKIIKDKDFLDNEENEDILEDIVLTLTLFE | |
| | DREMIEERLKTYAHLFDDKVMKQLKRRRYTGWGRLSRKLINGIRDKQSGKTILDFLK | |
| | SDGFANRNFMQLIHDDSLTFKEDIQKAQVSGQGDSLHEHIANLAGSPAIKKGILQTV | |
| | KVVDELVKVMGRHKPENIVIEMARENQTTQKGQKNSRERMKRIEEGIKELGSQILKE | |
| | HPVENTQLQNEKLYLYYLQNGRDMYVDQELDINRLSDYDVDHIVPQSFLKDDSIDNK | |
| | VLTRSDKNRGKSDNVPSEEVVKKMKNYWRQLLNAKLITQRKFDNLTKAERGGLSELD | |
| | KAGFIKRQLVETRQITKHVAQILDSRMNTKYDENDKLIREVKVITLKSKLVSDFRKD | |
| | FQFYKVREINNYHHAHDAYLNAVVGTALIKKYPKLESEFVYGDYKVYDVRKMIAKSE | |
| | QEIGKATAKYFFYSNIMNFFKTEITLANGEIRKRPLIETNGETGEIVWDKGRDFATV | |
| | RKVLSMPQVNIVKKTEVQTGGFSKESILPKRNSDKLIARKKDWDPKKYGGFDSPTVA | |
| | YSVLVVAKVEKGKSKKLKSVKELLGITIMERSSFEKNPIDFLEAKGYKEVKKDLIIK | |
| | LPKYSLFELENGRKRMLASAGELQKGNELALPSKYVNFLYLASHYEKLKGSPEDNEQ | |
| | KQLFVEQHKHYLDEIIEQISEFSKRVILADANLDKVLSAYNKHRDKPIREQAENIIH | |
| | LFTLTNLGAPAAFKYFDTTIDRKRYTSTKEVLDATLIHQSITGLYETRIDLSQLGGD | |
| | GSPKKKRKVSSDYKDHDGDYKDHDIDYKDDDDKAAG | |
| SpCas9 | ATGGATAAGAAATACTCAATAGGCTTAGATATCGGCACAAATAGCGTCGGATGGGCG | SEQ ID NO: 80 |
| Streptococcus | GTGATCACTGATGAATATAAGGTTCCGTCTAAAAAGTTCAAGGTTCTGGGAAATACA | |
| pyogenes | GACCGCCACAGTATCAAAAAAAATCTTATAGGGGCTCTTTTATTTGACAGTGGAGAG | |
| M1GAS wild | ACAGCGGAAGCGACTCGTCTCAAACGGACAGCTCGTAGAAGGTATACACGTCGGAAG | |
| type | AATCGTATTTGTTATCTACAGGAGATTTTTTCAAATGAGATGGCGAAAGTAGATGAT | |
| NC_002737.2 | AGTTTCTTTCATCGACTTGAAGAGTCTTTTTTGGTGGAAGAAGACAAGAAGCATGAA | |
| | CGTCATCCTATTTTTGGAAATATAGTAGATGAAGTTGCTTATCATGAGAAATATCCA | |
| | ACTATCTATCATCTGCGAAAAAAATTGGTAGATTCTACTGATAAAGCGGATTTGCGC | |
| | TTAATCTATTTGGCCTTAGCGCATATGATTAAGTTTCGTGGTCATTTTTTGATTGAG | |
| | GGAGATTTAAATCCTGATAATAGTGATGTGGACAAACTATTTATCCAGTTGGTACAA | |
| | ACCTACAATCAATTATTTGAAGAAAACCCTATTAACGCAAGTGGAGTAGATGCTAAA | |
| | GCGATTCTTTCTGCACGATTGAGTAAATCAAGACGATTAGAAAATCTCATTGCTCAG | |
| | CTCCCCGGTGAGAAGAAAAATGGCTTATTTGGGAATCTCATTGCTTTGTCATTGGGT | |
| | TTGACCCCTAATTTTAAATCAAATTTTGATTTGGCAGAAGATGCTAAATTACAGCTT | |
| | TCAAAAGATACTTACGATGATGATTTAGATAATTTATTGGCGCAAATTGGAGATCAA | |
| | TATGCTGATTTGTTTTTGGCAGCTAAGAATTTATCAGATGCTATTTTACTTTCAGAT | |
| | ATCCTAAGAGTAAATACTGAAATAACTAAGGCTCCCCTATCAGCTTCAATGATTAAA | |
| | CGCTACGATGAACATCATCAAGACTTGACTCTTTTAAAAGCTTTAGTTCGACAACAA | |
| | CTTCCAGAAAAGTATAAAGAAATCTTTTTTGATCAATCAAAAAACGGATATGCAGGT | |
| | TATATTGATGGGGGAGCTAGCCAAGAAGAATTTTATAAATTTATCAAACCAATTTTA | |
| | GAAAAAATGGATGGTACTGAGGAATTATTGGTGAAACTAAATCGTGAAGATTTGCTG | |
| | CGCAAGCAACGGACCTTTGACAACGGCTCTATTCCCCATCAAATTCACTTGGGTGAG | |
| | CTGCATGCTATTTTGAGAAGACAAGAAGACTTTTATCCATTTTTAAAAGACAATCGT | |
| | GAGAAGATTGAAAAAATCTTGACTTTTCGAATTCCTTATTATGTTGGTCCATTGGCG | |
| | CGTGGCAATAGTCGTTTTGCATGGATGACTCGGAAGTCTGAAGAAACAATTACCCCA | |
| | TGGAATTTTGAAGAAGTTGTCGATAAAGGTGCTTCAGCTCAATCATTTATTGAACGC | |
| | ATGACAAACTTTGATAAAAATCTTCCAAATGAAAAAGTACTACCAAAACATAGTTTG | |
| | CTTTATGAGTATTTTACGGTTTATAACGAATTGACAAAGGTCAAATATGTTACTGAA | |
| | GGAATGCGAAAACCAGCATTTCTTTCAGGTGAACAGAAGAAAGCCATTGTTGATTTA | |
| | CTCTTCAAAACAAATCGAAAAGTAACCGTTAAGCAATTAAAAGAAGATTATTTCAAA | |
| | AAAATAGAATGTTTTGATAGTGTTGAAATTTCAGGAGTTGAAGATAGATTTAATGCT | |
| | TCATTAGGTACCTACCATGATTTGCTAAAAATTATTAAAGATAAAGATTTTTTGGAT | |
| | AATGAAGAAAATGAAGATATCTTAGAGGATATTGTTTTAACATTGACCTTATTTGAA | |
| | GATAGGGAGATGATTGAGGAAAGACTTAAAACATATGCTCACCTCTTTGATGATAAG | |
| | GTGATGAAACAGCTTAAACGTCGCCGTTATACTGGTTGGGGACGTTTGTCTCGAAAA | |
| | TTGATTAATGGTATTAGGGATAAGCAATCTGGCAAAACAATATTAGATTTTTTGAAA | |
| | TCAGATGGTTTTGCCAATCGCAATTTTATGCAGCTGATCCATGATGATAGTTTGACA | |
| | TTTAAAGAAGACATTCAAAAAGCACAAGTGTCTGGACAAGGCGATAGTTTACATGAA | |
| | CATATTGCAAATTTAGCTGGTAGCCCTGCTATTAAAAAAGGTATTTTACAGACTGTA | |
| | AAAGTTGTTGATGAATTGGTCAAAGTAATGGGGCGGCATAAGCCAGAAAATATCGTT | |
| | ATTGAAATGGCACGTGAAAATCAGACAACTCAAAAGGGCCAGAAAAATTCGCGAGAG | |
| | CGTATGAAACGAATCGAAGAAGGTATCAAAGAATTAGGAAGTCAGATTCTTAAAGAG | |
| | CATCCTGTTGAAAATACTCAATTGCAAAATGAAAAGCTCTATCTCTATTATCTCCAA | |
| | AATGGAAGAGACATGTATGTGGACCAAGAATTAGATATTAATCGTTTAAGTGATTAT | |
| | GATGTCGATCACATTGTTCCACAAAGTTTCCTTAAAGACGATTCAATAGACAATAAG | |
| | GTCTTAACGCGTTCTGATAAAAATCGTGGTAAATCGGATAACGTTCCAAGTGAAGAA | |
| | GTAGTCAAAAAGATGAAAAACTATTGGAGACAACTTCTAAACGCCAAGTTAATCACT | |
| | CAACGTAAGTTTGATAATTTAACGAAAGCTGAACGTGGAGGTTTGAGTGAACTTGAT | |
| | AAAGCTGGTTTTATCAAACGCCAATTGGTTGAAACTCGCCAAATCACTAAGCATGTG | |
| | GCACAAATTTTGGATAGTCGCATGAATACTAAATACGATGAAAATGATAAACTTATT | |
| | CGAGAGGTTAAAGTGATTACCTTAAAATCTAAATTAGTTTCTGACTTCCGAAAAGAT | |
| | TTCCAATTCTATAAAGTACGTGAGATTAACAATTACCATCATGCCCATGATGCGTAT | |
| | CTAAATGCCGTCGTTGGAACTGCTTTGATTAAGAAATATCCAAAACTTGAATCGGAG | |
| | TTTGTCTATGGTGATTATAAAGTTTATGATGTTCGTAAAATGATTGCTAAGTCTGAG | |
| | CAAGAAATAGGCAAAGCAACCGCAAAATATTTCTTTTACTCTAATATCATGAACTTC | |
| | TTCAAAACAGAAATTACACTTGCAAATGGAGAGATTCGCAAACGCCCTCTAATCGAA | |
| | ACTAATGGGGAAACTGGAGAAATTGTCTGGGATAAAGGGCGAGATTTTGCCACAGTG | |
| | CGCAAAGTATTGTCCATGCCCCAAGTCAATATTGTCAAGAAAACAGAAGTACAGACA | |
| | GGCGGATTCTCCAAGGAGTCAATTTTACCAAAAAGAAATTCGGACAAGCTTATTGCT | |
| | CGTAAAAAAGACTGGGATCCAAAAAAATATGGTGGTTTTGATAGTCCAACGGTAGCT | |
| | TATTCAGTCCTAGTGGTTGCTAAGGTGGAAAAAGGGAAATCGAAGAAGTTAAAATCC | |
| | GTTAAAGAGTTACTAGGGATCACAATTATGGAAAGAAGTTCCTTTGAAAAAAATCCG | |
| | ATTGACTTTTTAGAAGCTAAAGGATATAAGGAAGTTAAAAAAGACTTAATCATTAAA | |
| | CTACCTAAATATAGTCTTTTTGAGTTAGAAAACGGTCGTAAACGGATGCTGGCTAGT | |
| | GCCGGAGAATTACAAAAAGGAAATGAGCTGGCTCTGCCAAGCAAATATGTGAATTTT | |
| | TTATATTTAGCTAGTCATTATGAAAAGTTGAAGGGTAGTCCAGAAGATAACGAACAA | |
| | AAACAATTGTTTGTGGAGCAGCATAAGCATTATTTAGATGAGATTATTGAGCAAATC | |
| | AGTGAATTTTCTAAGCGTGTTATTTTAGCAGATGCCAATTTAGATAAAGTTCTTAGT | |
| | GCATATAACAAACATAGAGACAAACCAATACGTGAACAAGCAGAAAATATTATTCAT | |
| | TTATTTACGTTGACGAATCTTGGAGCTCCCGCTGCTTTTAAATATTTTGATACAACA | |
| | ATTGATCGTAAACGATATACGTCTACAAAAGAAGTTTTAGATGCCACTCTTATCCAT | |
| | CAATCCATCACTGGTCTTTATGAAACACGCATTGATTTGAGTCAGCTAGGAGGTGAC | |
| | TGA | |
| SpCas9 | MDKKYSIGLDIGTNSVGWAVITDEYKVPSKKFKVLGNTDRHSIKKNLIGALLFDSGE | SEQ ID NO: 81 |
| Streptococcus | TAEATRLKRTARRRYTRRKNRICYLQEIFSNEMAKVDDSFFHRLEESFLVEEDKKHE | |
| pyogenes | RHPIFGNIVDEVAYHEKYPTIYHLRKKLVDSTDKADLRLIYLALAHMIKFRGHFLIE | |
| M1GAS wild | GDLNPDNSDVDKLFIQLVQTYNQLFEENPINASGVDAKAILSARLSKSRRLENLIAQ | |
| type | LPGEKKNGLFGNLIALSLGLTPNFKSNFDLAEDAKLQLSKDTYDDDLDNLLAQIGDQ | |
| Encoded | YADLFLAAKNLSDAILLSDILRVNTEITKAPLSASMIKRYDEHHQDLTLLKALVRQQ | |
| product of | LPEKYKEIFFDQSKNGYAGYIDGGASQEEFYKFIKPILEKMDGTEELLVKLNREDLL | |
| NC_002737.2 | RKQRTFDNGSIPHQIHLGELHAILRRQEDFYPFLKDNREKIEKILTFRIPYYVGPLA | |
| (100% | RGNSRFAWMTRKSEETITPWNFEEVVDKGASAQSFIERMTNFDKNLPNEKVLPKHSL | |
| identical to | LYEYFTVYNELTKVKYVTEGMRKPAFLSGEQKKAIVDLLFKTNRKVTVKQLKEDYFK | |
| the canonical | KIECFDSVEISGVEDRFNASLGTYHDLLKIIKDKDFLDNEENEDILEDIVLTLTLFE | |
| Q99ZW2 | DREMIEERLKTYAHLFDDKVMKQLKRRRYTGWGRLSRKLINGIRDKQSGKTILDFLK | |
| wild type) | SDGFANRNFMQLIHDDSLTFKEDIQKAQVSGQGDSLHEHIANLAGSPAIKKGILQTV | |
| | KVVDELVKVMGRHKPENIVIEMARENQTTQKGQKNSRERMKRIEEGIKELGSQILKE | |
| | HPVENTQLQNEKLYLYYLQNGRDMYVDQELDINRLSDYDVDHIVPQSFLKDDSIDNK | |
| | VLTRSDKNRGKSDNVPSEEVVKKMKNYWRQLLNAKLITQRKFDNLTKAERGGLSELD | |
| | KAGFIKRQLVETRQITKHVAQILDSRMNTKYDENDKLIREVKVITLKSKLVSDFRKD | |
| | FQFYKVREINNYHHAHDAYLNAVVGTALIKKYPKLESEFVYGDYKVYDVRKMIAKSE | |
| | QEIGKATAKYFFYSNIMNFFKTEITLANGEIRKRPLIETNGETGEIVWDKGRDFATV | |
| | RKVLSMPQVNIVKKTEVQTGGFSKESILPKRNSDKLIARKKDWDPKKYGGFDSPTVA | |
| | YSVLVVAKVEKGKSKKLKSVKELLGITIMERSSFEKNPIDFLEAKGYKEVKKDLIIK | |
| | LPKYSLFELENGRKRMLASAGELQKGNELALPSKYVNFLYLASHYEKLKGSPEDNEQ | |
| | KQLFVEQHKHYLDEIIEQISEFSKRVILADANLDKVLSAYNKHRDKPIREQAENIIH | |
| | LFTLTNLGAPAAFKYFDTTIDRKRYTSTKEVLDATLIHQSITGLYETRIDLSQLGGD | |

[0158] The base editors described herein may include any of the above SpCas9 sequences, or any variant thereof having at least 80%, at least 85%, at least 90%, at least 95%, or at least 99% sequence identity thereto.

### (ii) Wild Type Cas9 Orthologs

[0159] In other embodiments, the Cas9 protein can be a wild type Cas9 ortholog from another bacterial species. For example, the following Cas9 orthologs can be used in connection with the base editor constructs described in this specification. In addition, any variant Cas9 orthologs having at least 80%, at least 85%, at least 90%, at least 95%, or at least 99% sequence identity to any of the below orthologs may also be used with the present base editors.

| Description | Sequence |
|---|---|
| LfCas 9 | MKEYHIGLDIGTSSIGWAVTDSQFKLMRIKGKTAIGVRLFEEGKTAAERRTFRTTRRRLKRRKWRLHYLDEI |
| Lactobacillus | FAPHLQEVDENFLRRLKQSNIHPEDPTKNQAFIGKLLFPDLLKKNERGYPTLIKMRDELPVEQRAHYPVMNI |
| fermentum | YKLREAMINEDRQFDLREVYLAVHHIVKYRGHFLNNASVDKFKVGRIDFDKSFNVLNEAYEELQNGEGSFTI |
| wild type | EPSKVEKIGQLLLDTKMRKLDRQKAVAKLLEVKVADKEETKRNKQIATAMSKLVLGYKADFATVAMANGNEW |
| GenBank: | KIDLSSETSEDEIEKFREELSDAQNDILTEITSLFSQIMLNEIVPNGMSISESMMDRYWTHERQLAEVKEYL |
| SNX31424.11 | ATQPASARKEFDQVYNKYIGQAPKERGFDLEKGLKKILSKKENWKEIDELLKAGDFLPKQRTSANGVIPHQM |
| | HQQELDRIIEKQAKYYPWLATENPATGERDRHQAKYELDQLVSFRIPYYVGPLVTPEVQKATSGAKFAWAKR |
| | KEDGEITPWNLWDKIDRAESAEAFIKRMTVKDTYLLNEDVLPANSLLYQKYNVLNELNNVRVNGRRLSVGIK |
| | QDIYTELFKKKKTVKASDVASLVMAKTRGVNKPSVEGLSDPKKFNSNLATYLDLKSIVGDKVDDNRYQTDLE |
| | NIIEWRSVFEDGEIFADKLTEVEWLTDEQRSALVKKRYKGWGRLSKKLLTGIVDENGQRIIDLMWNTDQNFK |
| | EIVDQPVFKEQIDQLNQKAITNDGMTLRERVESVLDDAYTSPQNKKAIWQVVRVVEDIVKAVGNAPKSISIE |
| | FARNEGNKGEITRSRRTQLQKLFEDQAHELVKDTSLTEELEKAPDLSDRYYFYFTQGGKDMYTGDPINFDEI |
| | STKYDIDHILPQSFVKDNSLDNRVLTSRKENNKKSDQVPAKLYAAKMKPYWNQLLKQGLITQRKFENLTKDV |
| | DQNIKYRSLGFVKRQLVETRQVIKLTANILGSMYQEAGTEIIETRAGLTKQLREEFDLPKVREVNDYHHAVD |
| | AYLTTFAGQYLNRRYPKLRSFFVYGEYMKFKHGSDLKLRNFNFFHELMEGDKSQGKVVDQQTGELITTRDEV |
| | AKSFDRLLNMKYMLVSKEVHDRSDQLYGATIVTAKESGKLTSPIEIKKNRLVDLYGAYTNGTSAFMTIIKFT |
| | GNKPKYKVIGIPTTSAASLKRAGKPGSESYNQELHRIIKSNPKVKKGFEIVVPHVSYGQLIVDGDCKFTLAS |
| | PTVQHPATQLVLSKKSLETISSGYKILKDKPAIANERLIRVFDEVVGQMNRYFTIFDQRSNRQKVADARDKF |
| | LSLPTESKYEGAKKVQVGKTEVITNLLMGLHANATQGDLKVLGLATFGFFQSTTGLSLSEDTMIVYQSPTGL |
| | FERRICLKDI |
| | (SEQ ID NO: 82) |
| SaCas 9 | MDKKYSIGLDIGTNSVGWAVITDEYKVPSKKFKVLGNTDRHSIKKNLIGALLFDSGETAEATRLKRTARRRY |
| Staphylococcus | TRRKNRICYLQEIFSNEMAKVDDSFFHRLEESFLVEEDKKHERHPIFGNIVDEVAYHEKYPTIYHLRKKLVD |
| aureus | STDKADLRLIYLALAHMIKFRGHFLIEGDLNPDNSDVDKLFIQLVQTYNQLFEENPINASGVDAKAILSARL |
| wild type | SKSRRLENLIAQLPGEKKNGLFGNLIALSLGLTPNFKSNFDLAEDAKLQLSKDTYDDDLDNLLAQIGDQYAD |
| GenBank: | LFLAAKNLSDAILLSDILRVNTEITKAPLSASMIKRYDEHHQDLTLLKALVRQQLPEKYKEIFFDQSKNGYA |
| AYD60528.1 | GYIDGGASQEEFYKFIKPILEKMDGTEELLVKLNREDLLRKQRTFDNGSIPHQIHLGELHAILRRQEDFYPF |
| | LKDNREKIEKILTFRIPYYVGPLARGNSRFAWMTRKSEETITPWNFEEVVDKGASAQSFIERMTNFDKNLPN |
| | EKVLPKHSLLYEYFTVYNELTKVKYVTEGMRKPAFLSGEQKKAIVDLLFKTNRKVTVKQLKEDYFKKIECFD |
| | SVEISGVEDRFNASLGTYHDLLKIIKDKDFLDNEENEDILEDIVLTLTLFEDREMIEERLKTYAHLFDDKVM |
| | KQLKRRRYTGWGRLSRKLINGIRDKQSGKTILDFLKSDGFANRNFMQLIHDDSLTFKEDIQKAQVSGQGDSL |
| | HEHIANLAGSPAIKKGILQTVKVVDELVKVMGRHKPENIVIEMARENQTTQKGQKNSRERMKRIEEGIKELG |
| | SQILKEHPVENTQLQNEKLYLYYLQNGRDMYVDQELDINRLSDYDVDHIVPQSFLKDDSIDNKVLTRSDKNR |
| | GKSDNVPSEEVVKKMKNYWRQLLNAKLITQRKFDNLTKAERGGLSELDKAGFIKRQLVETRQITKHVAQILD |
| | SRMNTKYDENDKLIREVKVITLKSKLVSDFRKDFQFYKVREINNYHHAHDAYLNAVVGTALIKKYPKLESEF |
| | VYGDYKVYDVRKMIAKSEQEIGKATAKYFFYSNIMNFFKTEITLANGEIRKRPLIETNGETGEIVWDKGRDF |
| | ATVRKVLSMPQVNIVKKTEVQTGGFSKESILPKRNSDKLIARKKDWDPKKYGGFDSPTVAYSVLVVAKVEKG |
| | KSKKLKSVKELLGITIMERSSFEKNPIDFLEAKGYKEVKKDLIIKLPKYSLFELENGRKRMLASAGELQKGN |
| | ELALPSKYVNFLYLASHYEKLKGSPEDNEQKQLFVEQHKHYLDEIIEQISEFSKRVILADANLDKVLSAYNK |
| | HRDKPIREQAENIIHLFTLTNLGAPAAFKYFDTTIDRKRYTSTKEVLDATLIHQSITGLYETRIDLSQLGGD |
| | (SEQ ID NO: 83) |
| SaCas 9 | MGKRNYILGLDIGITSVGYGIIDYETRDVIDAGVRLFKEANVENNEGRRSKRGARRLKRRRRHRIQRVKKLL |
| Staphylococcus | FDYNLLTDHSELSGINPYEARVKGLSQKLSEEEFSAALLHLAKRRGVHNVNEVEEDTGNELSTKEQISRNSK |
| aureus | ALEEKYVAELQLERLKKDGEVRGSINRFKTSDYVKEAKQLLKVQKAYHQLDQSFIDTYIDLLETRRTYYEGP |
| | GEGSPFGWKDIKEWYEMLMGHCTYFPEELRSVKYAYNADLYNALNDLNNLVITRDENEKLEYYEKFQIIENV |
| | FKQKKKPTLKQIAKEILVNEEDIKGYRVTSTGKPEFTNLKVYHDIKDITARKEIIENAELLDQIAKILTIYQ |
| | SSEDIQEELTNLNSELTQEEIEQISNLKGYTGTHNLSLKAINLILDELWHTNDNQIAIFNRLKLVPKKVDLS |
| | QQKEIPTTLVDDFILSPVVKRSFIQSIKVINAIIKKYGLPNDIIIELAREKNSKDAQKMINEMQKRNRQTNE |
| | RIEEIIRTTGKENAKYLIEKIKLHDMQEGKCLYSLEAIPLEDLLNNPFNYEVDHIIPRSVSFDNSFNNKVLV |
| | KQEENSKKGNRTPFQYLSSSDSKISYETFKKHILNLAKGKGRISKTKKEYLLEERDINRFSVQKDFINRNLV |
| | DTRYATRGLMNLLRSYFRVNNLDVKVKSINGGFTSFLRRKWKFKKERNKGYKHHAEDALIIANADFIFKEWK |
| | KLDKAKKVMENQMFEEKQAESMPEIETEQEYKEIFITPHQIKHIKDFKDYKYSHRVDKKPNRKLINDTLYST |
| | RKDDKGNTLIVNNLNGLYDKDNDKLKKLINKSPEKLLMYHHDPQTYQKLKLIMEQYGDEKNPLYKYYEETGN |
| | YLTKYSKKDNGPVIKKIKYYGNKLNAHLDITDDYPNSRNKVVKLSLKPYRFDVYLDNGVYKFVTVKNLDVIK |
| | KENYYEVNSKCYEEAKKLKKISNQAEFIASFYKNDLIKINGELYRVIGVNNDLLNRIEVNMIDITYREYLEN |
| | MNDKRPPHIIKTIASKTQSIKKYSTDILGNLYEVKSKKHPQIIKK |
| | (SEQ ID NO: 84) |
| StCas9 | MLFNKCIIISINLDFSNKEKCMTKPYSIGLDIGTNSVGWAVITDNYKVPSKKMKVLGNTSKKYIKKNLLGVL |
| Streptococcus | LFDSGITAEGRRLKRTARRRYTRRRNRILYLQEIFSTEMATLDDAFFQRLDDSFLVPDDKRDSKYPIFGNLV |
| thermophilus | EEKVYHDEFPTIYHLRKYLADSTKKADLRLVYLALAHMIKYRGHFLIEGEFNSKNNDIQKNFQDFLDTYNAI |
| UniProtKB/ | FESDLSLENSKQLEEIVKDKISKLEKKDRILKLFPGEKNSGIFSEFLKLIVGNQADFRKCFNLDEKASLHFS |
| Swiss-Prot: | KESYDEDLETLLGYIGDDYSDVFLKAKKLYDAILLSGFLTVTDNETEAPLSSAMIKRYNEHKEDLALLKEYI |
| G3ECR1.2 | RNISLKTYNEVFKDDTKNGYAGYIDGKTNQEDFYVYLKNLLAEFEGADYFLEKIDREDFLRKQRTFDNGSIP |
| Wild type | YQIHLQEMRAILDKQAKFYPFLAKNKERIEKILTFRIPYYVGPLARGNSDFAWSIRKRNEKITPWNFEDVID |
| | KESSAEAFINRMTSFDLYLPEEKVLPKHSLLYETFNVYNELTKVRFIAESMRDYQFLDSKQKKDIVRLYFKD |
| | KRKVTDKDIIEYLHAIYGYDGIELKGIEKQFNSSLSTYHDLLNIINDKEFLDDSSNEAIIEEIIHTLTIFED |
| | REMIKQRLSKFENIFDKSVLKKLSRRHYTGWGKLSAKLINGIRDEKSGNTILDYLIDDGISNRNFMQLIHDD |
| | ALSFKKKIQKAQIIGDEDKGNIKEVVKSLPGSPAIKKGILQSIKIVDELVKVMGGRKPESIVVEMARENQYT |
| | NQGKSNSQQRLKRLEKSLKELGSKILKENIPAKLSKIDNNALQNDRLYLYYLQNGKDMYTGDDLDIDRLSNY |
| | DIDHIIPQAFLKDNSIDNKVLVSSASNRGKSDDFPSLEVVKKRKTFWYQLLKSKLISQRKFDNLTKAERGGL |
| | LPEDKAGFIQRQLVETRQITKHVARLLDEKFNNKKDENNRAVRTVKIITLKSTLVSQFRKDFELYKVREIND |
| | FHHAHDAYLNAVIASALLKKYPKLEPEFVYGDYPKYNSFRERKSATEKVYFYSNIMNIFKKSISLADGRVIE |
| | RPLIEVNEETGESVWNKESDLATVRRVLSYPQVNVVKKVEEQNHGLDRGKPKGLFNANLSSKPKPNSNENLV |
| | GAKEYLDPKKYGGYAGISNSFAVLVKGTIEKGAKKKITNVLEFQGISILDRINYRKDKLNFLLEKGYKDIEL |
| | IIELPKYSLFELSDGSRRMLASILSTNNKRGEIHKGNQIFLSQKFVKLLYHAKRISNTINENHRKYVENHKK |
| | EFEELFYYILEFNENYVGAKKNGKLLNSAFQSWQNHSIDELCSSFIGPTGSERKGLFELTSRGSAADFEFLG |
| | VKIPRYRDYTPSSLLKDATLIHQSVTGLYETRIDLAKLGEG |
| | (SEQ ID NO: 85) |
| LcCas 9 | MKIKNYNLALTPSTSAVGHVEVDDDLNILEPVHHQKAIGVAKFGEGETAEARRLARSARRTTKRRANRINHY |
| Lactobacillus | FNEIMKPEIDKVDPLMFDRIKQAGLSPLDERKEFRTVIFDRPNIASYYHNQFPTIWHLQKYLMITDEKADIR |
| crispatus | LIYWALHSLLKHRGHFFNTTPMSQFKPGKLNLKDDMLALDDYNDLEGLSFAVANSPEIEKVIKDRSMHKKEK |
| NCBI | IAELKKLIVNDVPDKDLAKRNNKIITQIVNAIMGNSFHLNFIFDMDLDKLTSKAWSFKLDDPELDTKFDAIS |
| Reference | GSMTDNQIGIFETLQKIYSAISLLDILNGSSNVVDAKNALYDKHKRDLNLYFKFLNTLPDEIAKTLKAGYTL |
| Sequence: | YIGNRKKDLLAARKLLKVNVAKNFSQDDFYKLINKELKSIDKQGLQTRFSEKVGELVAQNNFLPVRQRSSDN |
| WP_133478044.1 | VFIPYQLNAITFNKILENQGKYYDFLVKPNPAKKDRKNAPYELSQLMQFTIPYYVGPLVTPEEQVKSGIPKT |
| Wild type | SRFAWMVRKDNGAITPWNFYDKVDIEATADKFIKRSIAKDSYLLSELVLPKHSLLYEKYEVFNELSNVSLDG |
| | KKLSGGVKQILFNEVFKKTNKVNTSRILKALAKHNIPGSKITGLSNPEEFTSSLQTYNAWKKYFPNQIDNFA |
| | YQQDLEKMIEWSTVFEDHKILAKKLDEIEWLDDDQKKFVANTRLRGWGRLSKRLLTGLKDNYGKSIMQRLET |
| | TKANFQQIVYKPEFREQIDKISQAAAKNQSLEDILANSYTSPSNRKAIRKTMSVVDEYIKLNHGKEPDKIFL |
| | MFQRSEQEKGKQTEARSKQLNRILSQLKADKSANKLFSKQLADEFSNAIKKSKYKLNDKQYFYFQQLGRDAL |
| | TGEVIDYDELYKYTVLHIIPRSKLTDDSQNNKVLTKYKIVDGSVALKFGNSYSDALGMPIKAFWTELNRLKL |
| | IPKGKLLNLTTDFSTLNKYQRDGYIARQLVETQQIVKLLATIMQSRFKHTKIIEVRNSQVANIRYQFDYFRI |
| | KNLNEYYRGFDAYLAAVVGTYLYKVYPKARRLFVYGQYLKPKKTNQENQDMHLDSEKKSQGFNFLWNLLYGK |
| | QDQIFVNGTDVIAFNRKDLITKMNTVYNYKSQKISLAIDYHNGAMFKATLFPRNDRDTAKTRKLIPKKKDYD |
| | TDIYGGYTSNVDGYMLLAEIIKRDGNKQYGFYGVPSRLVSELDTLKKTRYTEYEEKLKEIIKPELGVDLKKI |
| | KKIKILKNKVPFNQVIIDKGSKFFITSTSYRWNYRQLILSAESQQTLMDLVVDPDFSNHKARKDARKNADER |
| | LIKVYEEILYQVKNYMPMFVELHRCYEKLVDAQKTFKSLKISDKAMVLNQILILLHSNATSPVLEKLGYHTR |
| | FTLGKKHNLISENAVLVTQSITGLKENHVSIKQML |
| | (SEQ ID NO: 86) |
| PdCas9 | MTNEKYSIGLDIGTSSIGFAVVNDNNRVIRVKGKNAIGVRLFDEGKAAADRRSFRTTRRSFRTTRRRLSRRR |
| Pedicoccus | WRLKLLREIFDAYITPVDEAFFIRLKESNLSPKDSKKQYSGDILFNDRSDKDFYEKYPTIYHLRNALMTEHR |
| damnosus | KFDVREIYLAIHHIMKFRGHFLNATPANNFKVGRLNLEEKFEELNDIYQRVFPDESIEFRTDNLEQIKEVLL |
| NCBI | DNKRSRADRQRTLVSDIYQSSEDKDIEKRNKAVATEILKASLGNKAKLNVITNVEVDKEAAKEWSITFDSES |
| Reference | IDDDLAKIEGQMTDDGHEIIEVLRSLYSGITLSAIVPENHTLSQSMVAKYDLHKDHLKLFKKLINGMTDTKK |
| Sequence: | AKNLRAAYDGYIDGVKGKVLPQEDFYKQVQVNLDDSAEANEIQTYIDQDIFMPKQRTKANGSIPHQLQQQEL |
| WP_062913273.1 | DQIIENQKAYYPWLAELNPNPDKKRQQLAKYKLDELVTFRVPYYVGPMITAKDQKNQSGAEFAWMIRKEPGN |
| Wild type | ITPWNFDQKVDRMATANQFIKRMTTTDTYLLGEDVLPAQSLLYQKFEVLNELNKIRIDHKPISIEQKQQIFN |
| | DLFKQFKNVTIKHLQDYLVSQGQYSKRPLIEGLADEKRFNSSLSTYSDLCGIFGAKLVEENDRQEDLEKIIE |
| | WSTIFEDKKIYRAKLNDLTWLTDDQKEKLATKRYQGWGRLSRKLLVGLKNSEHRNIMDILWITNENFMQIQA |
| | EPDFAKLVTDANKGMLEKTDSQDVINDLYTSPQNKKAIRQILLVVHDIQNAMHGQAPAKIHVEFARGEERNP |
| | RRSVRQRQRQVEAAYEKVSNELVSAKVRQEFKEAINNKRDFKDRLFLYFMQGGIDIYTGKQLNIDQLSSYQI |
| | DHILPQAFVKDDSLTNRVLTNENQVKADSVPIDIFGKKMLSVWGRMKDQGLISKGKYRNLTMNPENISAHTE |
| | NGFINRQLVETRQVIKLAVNILADEYGDSTQIISVKADLSHQMREDFELLKNRDVNDYHHAFDAYLAAFIGN |
| | YLLKRYPKLESYFVYGDFKKFTQKETKMRRFNFIYDLKHCDQVVNKETGEILWTKDEDIKYIRHLFAYKKIL |
| | VSHEVREKRGALYNQTIYKAKDDKGSGQESKKLIRIKDDKETKIYGGYSGKSLAYMTIVQITKKNKVSYRVI |
| | GIPTLALARLNKLENDSTENNGELYKIIKPQFTHYKVDKKNGEIIETTDDFKIVVSKVRFQQLIDDAGQFFM |
| | LASDTYKNNAQQLVISNNALKAINNTNITDCPRDDLERLDNLRLDSAFDEIVKKMDKYFSAYDANNFREKIR |
| | NSNLIFYQLPVEDQWENNKITELGKRTVLTRILQGLHANATTTDMSIFKIKTPFGQLRQRSGISLSENAQLI |
| | YQSPTGLFERRVQLNKIK |
| | (SEQ ID NO: 87) |
| FnCas9 | MKKQKFSDYYLGFDIGTNSVGWCVTDLDYNVLRFNKKDMWGSRLFEEAKTAAERRVRQRNSRRRLKRRKWRL |
| Fusobaterium | NLLEEIFSNEILKIDSNFFRRLKESSLWLEDKSSKEKFTLFNDDNYKDYDFYKQYPTIFHLRNELIKNPEKK |
| nucleatum | DIRLVYLAIHSIFKSRGHFLFEGQNLKEIKNFETLYNNLIAFLEDNGINKIIDKNNIEKLEKIVCDSKKGLK |
| NCBI | DKEKEFKEIFNSDKQLVAIFKLSVGSSVSLNDLFDTDEYKKGEVEKEKISFREQIYEDDKPIYYSILGEKIE |
| Reference | LLDIAKTFYDFMVLNNILADSQYISEAKVKLYEEHKKDLKNLKYIIRKYNKGNYDKLFKDKNENNYSAYIGL |
| Sequence: | NKEKSKKEVIEKSRLKIDDLIKNIKGYLPKVEEIEEKDKAIFNKILNKIELKTILPKQRISDNGTLPYQIHE |
| WP_060798984.1 | AELEKILENQSKYYDFLNYEENGIITKDKLLMTFKFRIPYYVGPLNSYHKDKGGNSWIVRKEEGKILPWNFE |
| | QKVDIEKSAEEFIKRMTNKCTYLNGEDVIPKDTFLYSEYVILNELNKVQVNDEFLNEENKRKIIDELFKENK |
| | KVSEKKFKEYLLVKQIVDGTIELKGVKDSFNSNYISYIRFKDIFGEKLNLDIYKEISEKSILWKCLYGDDKK |
| | IFEKKIKNEYGDILTKDEIKKINTFKFNNWGRLSEKLLTGIEFINLETGECYSSVMDALRRTNYNLMELLSS |
| | KFTLQESINNENKEMNEASYRDLIEESYVSPSLKRAIFQTLKIYEEIRKITGRVPKKVFIEMARGGDESMKN |
| | KKIPARQEQLKKLYDSCGNDIANFSIDIKEMKNSLISYDNNSLRQKKLYLYYLQFGKCMYTGREIDLDRLLQ |
| | NNDTYDIDHIYPRSKVIKDDSFDNLVLVLKNENAEKSNEYPVKKEIQEKMKSFWRFLKEKNFISDEKYKRLT |
| | GKDDFELRGFMARQLVNVRQTTKEVGKILQQIEPEIKIVYSKAEIASSFREMFDFIKVRELNDTHHAKDAYL |
| | NIVAGNVYNTKFTEKPYRYLQEIKENYDVKKIYNYDIKNAWDKENSLEIVKKNMEKNTVNITRFIKEKKGQL |
| | FDLNPIKKGETSNEIISIKPKVYNGKDDKLNEKYGYYKSLNPAYFLYVEHKEKNKRIKSFERVNLVDVNNIK |
| | DEKSLVKYLIENKKLVEPRVIKKVYKRQVILINDYPYSIVTLDSNKLMDFENLKPLFLENKYEKILKNVIKF |
| | LEDNQGKSEENYKFIYLKKKDRYEKNETLESVKDRYNLEFNEMYDKFLEKLDSKDYKNYMNNKKYQELLDVK |
| | EKFIKLNLFDKAFTLKSFLDLFNRKTMADFSKVGLTKYLGKIQKISSNVLSKNELYLLEESVTGLFVKKIKL |
| | (SEQ ID NO: 88) |
| EcCas9 | RRKQRIQILQELLGEEVLKTDPGFFHRMKESRYVVEDKRTLDGKQVELPYALFVDKDYTDKEYYKQFPTINH |
| Enterococcus | LIVYLMTTSDTPDIRLVYLALHYYMKNRGNFLHSGDINNVKDINDILEQLDNVLETFLDGWNLKLKSYVEDI |
| cecorum | KNIYNRDLGRGERKKAFVNTLGAKTKAEKAFCSLISGGSTNLAELFDDSSLKEIETPKIEFASSSLEDKIDG |
| NCBI | IQEALEDRFAVIEAAKRLYDWKTLTDILGDSSSLAEARVNSYQMHHEQLLELKSLVKEYLDRKVFQEVFVSL |
| Reference | NVANNYPAYIGHTKINGKKKELEVKRTKRNDFYSYVKKQVIEPIKKKVSDEAVLTKLSEIESLIEVDKYLPL |
| Sequence: | QVNSDNGVIPYQVKLNELTRIFDNLENRIPVLRENRDKIIKTFKFRIPYYVGSLNGVVKNGKCTNWMVRKEE |
| WP_047338501.1 | GKIYPWNFEDKVDLEASAEQFIRRMTNKCTYLVNEDVLPKYSLLYSKYLVLSELNNLRIDGRPLDVKIKQDI |
| Wild type | YENVFKKNRKVTLKKIKKYLLKEGIITDDDELSGLADDVKSSLTAYRDFKEKLGHLDLSEAQMENIILNITL |
| | FGDDKKLLKKRLAALYPFIDDKSLNRIATLNYRDWGRLSERFLSGITSVDQETGELRTIIQCMYETQANLMQ |
| | LLAEPYHFVEAIEKENPKVDLESISYRIVNDLYVSPAVKRQIWQTLLVIKDIKQVMKHDPERIFIEMAREKQ |
| | ESKKTKSRKQVLSEVYKKAKEYEHLFEKLNSLTEEQLRSKKIYLYFTQLGKCMYSGEPIDFENLVSANSNYD |
| | IDHIYPQSKTIDDSFNNIVLVKKSLNAYKSNHYPIDKNIRDNEKVKTLWNTLVSKGLITKEKYERLIRSTPF |
| | SDEELAGFIARQLVETRQSTKAVAEILSNWFPESEIVYSKAKNVSNFRQDFEILKVRELNDCHHAHDAYLNI |
| | VVGNAYHTKFTNSPYRFIKNKANQEYNLRKLLQKVNKIESNGVVAWVGQSENNPGTIATVKKVIRRNTVLIS |
| | RMVKEVDGQLFDLTLMKKGKGQVPIKSSDERLTDISKYGGYNKATGAYFTFVKSKKRGKVVRSFEYVPLHLS |
| | KQFENNNELLKEYIEKDRGLTDVEILIPKVLINSLFRYNGSLVRITGRGDTRLLLVHEQPLYVSNSFVQQLK |
| | SVSSYKLKKSENDNAKLTKTATEKLSNIDELYDGLLRKLDLPIYSYWFSSIKEYLVESRTKYIKLSIEEKAL |
| | VIFEILHLFQSDAQVPNLKILGLSTKPSRIRIQKNLKDTDKMSIIHQSPSGIFEHEIELTSL |
| | (SEQ ID NO: 89) |
| AhCas9 | MQNGFLGITVSSEQVGWAVTNPKYELERASRKDLWGVRLFDKAETAEDRRMFRTNRRLNQRKKNRIHYLRDI |
| Anaerostipes | FHEEVNQKDPNFFQQLDESNFCEDDRTVEFNFDTNLYKNQFPTVYHLRKYLMETKDKPDIRLVYLAFSKFMK |
| hadrus | NRGHFLYKGNLGEVMDFENSMKGFCESLEKFNIDFPTLSDEQVKEVRDILCDHKIAKTVKKKNIITITKVKS |
| NCBI | KTAKAWIGLFCGCSVPVKVLFQDIDEEIVTDPEKISFEDASYDDYIANIEKGVGIYYEAIVSAKMLFDWSIL |
| Reference | NEILGDHQLLSDAMIAEYNKHHDDLKRLQKIIKGTGSRELYQDIFINDVSGNYVCYVGHAKTMSSADQKQFY |
| Sequence: | TFLKNRLKNVNGISSEDAEWIDTEIKNGTLLPKQTKRDNSVIPHQLQLREFELILDNMQEMYPFLKENREKL |
| WP_044924278.1 | LKIFNFVIPYYVGPLKGVVRKGESTNWMVPKKDGVIHPWNFDEMVDKEASAECFISRMTGNCSYLFNEKVLP |
| Wild type | KNSLLYETFEVLNELNPLKINGEPISVELKQRIYEQLFLTGKKVTKKSLTKYLIKNGYDKDIELSGIDNEFH |
| | SNLKSHIDFEDYDNLSDEEVEQIILRITVFEDKQLLKDYLNREFVKLSEDERKQICSLSYKGWGNLSEMLLN |
| | GITVTDSNGVEVSVMDMLWNTNLNLMQILSKKYGYKAEIEHYNKEHEKTIYNREDLMDYLNIPPAQRRKVNQ |
| | LITIVKSLKKTYGVPNKIFFKISREHQDDPKRTSSRKEQLKYLYKSLKSEDEKHLMKELDELNDHELSNDKV |
| | YLYFLQKGRCIYSGKKLNLSRLRKSNYQNDIDYIYPLSAVNDRSMNNKVLTGIQENRADKYTYFPVDSEIQK |
| | KMKGFWMELVLQGFMTKEKYFRLSRENDFSKSELVSFIEREISDNQQSGRMIASVLQYYFPESKIVFVKEKL |
| | ISSFKRDFHLISSYGHNHLQAAKDAYITIVVGNVYHTKFTMDPAIYFKNHKRKDYDLNRLFLENISRDGQIA |
| | WESGPYGSIQTVRKEYAQNHIAVTKRVVEVKGGLFKQMPLKKGHGEYPLKTNDPRFGNIAQYGGYTNVTGSY |
| | FVLVESMEKGKKRISLEYVPVYLHERLEDDPGHKLLKEYLVDHRKLNHPKILLAKVRKNSLLKIDGFYYRLN |
| | GRSGNALILTNAVELIMDDWQTKTANKISGYMKRRAIDKKARVYQNEFHIQELEQLYDFYLDKLKNGVYKNR |
| | KNNQAELIHNEKEQFMELKTEDQCVLLTEIKKLFVCSPMQADLTLIGGSKHTGMIAMSSNVTKADFAVIAED |
| | PLGLRNKVIYSHKGEK (SEQ ID NO: 90) |
| KvCas9 | MSQNNNKIYNIGLDIGDASVGWAVVDEHYNLLKRHGKHMWGSRLFTQANTAVERRSSRSTRRRYNKRRERIR |
| Kandleria | LLREIMEDMVLDVDPTFFIRLANVSFLDQEDKKDYLKENYHSNYNLFIDKDFNDKTYYDKYPTIYHLRKHLC |
| vitulina | ESKEKEDPRLIYLALHHIVKYRGNFLYEGQKFSMDVSNIEDKMIDVLRQFNEINLFEYVEDRKKIDEVLNVL |
| NCBI | KEPLSKKHKAEKAFALFDTTKDNKAAYKELCAALAGNKFNVTKMLKEAELHDEDEKDISFKFSDATFDDAFV |
| Reference | EKQPLLGDCVEFIDLLHDIYSWVELQNILGSAHTSEPSISAAMIQRYEDHKNDLKLLKDVIRKYLPKKYFEV |
| Sequence: | FRDEKSKKNNYCNYINHPSKTPVDEFYKYIKKLIEKIDDPDVKTILNKIELESFMLKQNSRTNGAVPYQMQL |
| WP_031589969.1 | DELNKILENQSVYYSDLKDNEDKIRSILTFRIPYYFGPLNITKDRQFDWIIKKEGKENERILPWNANEIVDV |
| Wild type | DKTADEFIKRMRNFCTYFPDEPVMAKNSLTVSKYEVLNEINKLRINDHLIKRDMKDKMLHTLFMDHKSISAN |
| | AMKKWLVKNQYFSNTDDIKIEGFQKENACSTSLTPWIDFTKIFGKINESNYDFIEKIIYDVTVFEDKKILRR |
| | RLKKEYDLDEEKIKKILKLKYSGWSRLSKKLLSGIKTKYKDSTRTPETVLEVMERTNMNLMQVINDEKLGFK |
| | KTIDDANSTSVSGKFSYAEVQELAGSPAIKRGIWQALLIVDEIKKIMKHEPAHVYIEFARNEDEKERKDSFV |
| | NQMLKLYKDYDFEDETEKEANKHLKGEDAKSKIRSERLKLYYTQMGKCMYTGKSLDIDRLDTYQVDHIVPQS |
| | LLKDDSIDNKVLVLSSENQRKLDDLVIPSSIRNKMYGFWEKLFNNKIISPKKFYSLIKTEFNEKDQERFINR |
| | QIVETRQITKHVAQIIDNHYENTKVVTVRADLSHQFRERYHIYKNRDINDFHHAHDAYIATILGTYIGHRFE |
| | SLDAKYIYGEYKRIFRNQKNKGKEMKKNNDGFILNSMRNIYADKDTGEIVWDPNYIDRIKKCFYYKDCFVTK |
| | KLEENNGTFFNVTVLPNDTNSDKDNTLATVPVNKYRSNVNKYGGFSGVNSFIVAIKGKKKKGKKVIEVNKLT |
| | GIPLMYKNADEEIKINYLKQAEDLEEVQIGKEILKNQLIEKDGGLYYIVAPTEIINAKQLILNESQTKLVCE |
| | IYKAMKYKNYDNLDSEKIIDLYRLLINKMELYYPEYRKQLVKKFEDRYEQLKVISIEEKCNIIKQILATLHC |
| | NSSIGKIMYSDFKISTTIGRLNGRTISLDDISFIAESPTGMYSKKYKL (SEQ ID NO: 91) |
| EfCas9 | MRLFEEGHTAEDRRLKRTARRRISRRRNRLRYLQAFFEEAMTDLDENFFARLQESFLVPEDKKWHRHPIFAK |
| Enterococcus | LEDEVAYHETYPTIYHLRKKLADSSEQADLRLIYLALAHIVKYRGHFLIEGKLSTENTSVKDQFQQFMVIYN |
| faecalis | QTFVNGESRLVSAPLPESVLIEEELTEKASRTKKSEKVLQQFPQEKANGLFGQFLKLMVGNKADFKKVFGLE |
| NCBI | EEAKITYASESYEEDLEGILAKVGDEYSDVFLAAKNVYDAVELSTILADSDKKSHAKLSSSMIVRFTEHQED |
| Reference | LKKFKRFIRENCPDEYDNLFKNEQKDGYAGYIAHAGKVSQLKFYQYVKKIIQDIAGAEYFLEKIAQENFLRK |
| Sequence: | QRTFDNGVIPHQIHLAELQAIIHRQAAYYPFLKENQEKIEQLVTFRIPYYVGPLSKGDASTFAWLKRQSEEP |
| WP_016631044.1 | IRPWNLQETVDLDQSATAFIERMTNFDTYLPSEKVLPKHSLLYEKFMVFNELTKISYTDDRGIKANFSGKEK |
| Wild type | EKIFDYLFKTRRKVKKKDIIQFYRNEYNTEIVTLSGLEEDQFNASFSTYQDLLKCGLTRAELDHPDNAEKLE |
| | DIIKILTIFEDRQRIRTQLSTFKGQFSAEVLKKLERKHYTGWGRLSKKLINGIYDKESGKTILDYLVKDDGV |
| | SKHYNRNFMQLINDSQLSFKNAIQKAQSSEHEETLSETVNELAGSPAIKKGIYQSLKIVDELVAIMGYAPKR |
| | IVVEMARENQTTSTGKRRSIQRLKIVEKAMAEIGSNLLKEQPTTNEQLRDTRLFLYYMQNGKDMYTGDELSL |
| | HRLSHYDIDHIIPQSFMKDDSLDNLVLVGSTENRGKSDDVPSKEVVKDMKAYWEKLYAAGLISQRKFQRLTK |
| | GEQGGLTLEDKAHFIQRQLVETRQITKNVAGILDQRYNAKSKEKKVQIITLKASLTSQFRSIFGLYKVREVN |
| | DYHHGQDAYLNCVVATTLLKVYPNLAPEFVYGEYPKFQTFKENKATAKAIIYTNLLRFFTEDEPRFTKDGEI |
| | LWSNSYLKTIKKELNYHQMNIVKKVEVQKGGFSKESIKPKGPSNKLIPVKNGLDPQKYGGFDSPVVAYTVLF |
| | THEKGKKPLIKQEILGITIMEKTRFEQNPILFLEEKGFLRPRVLMKLPKYTLYEFPEGRRRLLASAKEAQKG |
| | NQMVLPEHLLTLLYHAKQCLLPNQSESLAYVEQHQPEFQEILERVVDFAEVHTLAKSKVQQIVKLFEANQTA |
| | DVKEIAASFIQLMQFNAMGAPSTFKFFQKDIERARYTSIKEIFDATIIYQSPTGLYETRRKVVD |
| | (SEQ ID NO: 92) |
| Staphylococcus | KRNYILGLDIGITSVGYGIIDYETRDVIDAGVRLFKEANVENNEGRRSKRGARRLKRRRRHRIQRVKKLLFD |
| aureus | YNLLTDHSELSGINPYEARVKGLSQKLSEEEFSAALLHLAKRRGVHNVNEVEEDTGNELSTKEQISRNSKAL |
| Cas9 | EEKYVAELQLERLKKDGEVRGSINRFKTSDYVKEAKQLLKVQKAYHQLDQSFIDTYIDLLETRRTYYEGPGE |
| | GSPFGWKDIKEWYEMLMGHCTYFPEELRSVKYAYNADLYNALNDLNNLVITRDENEKLEYYEKFQIIENVFK |
| | QKKKPTLKQIAKEILVNEEDIKGYRVTSTGKPEFTNLKVYHDIKDITARKEIIENAELLDQIAKILTIYQSS |
| | EDIQEELTNLNSELTQEEIEQISNLKGYTGTHNLSLKAINLILDELWHTNDNQIAIFNRLKLVPKKVDLSQQ |
| | KEIPTTLVDDFILSPVVKRSFIQSIKVINAIIKKYGLPNDIIIELAREKNSKDAQKMINEMQKRNRQTNERI |
| | EEIIRTTGKENAKYLIEKIKLHDMQEGKCLYSLEAIPLEDLLNNPFNYEVDHIIPRSVSFDNSFNNKVLVKQ |
| | EENSKKGNRTPFQYLSSSDSKISYETFKKHILNLAKGKGRISKTKKEYLLEERDINRFSVQKDFINRNLVDT |
| | RYATRGLMNLLRSYFRVNNLDVKVKSINGGFTSFLRRKWKFKKERNKGYKHHAEDALIIANADFIFKEWKKL |
| | DKAKKVMENQMFEEKQAESMPEIETEQEYKEIFITPHQIKHIKDFKDYKYSHRVDKKPNRELINDTLYSTRK |
| | DDKGNTLIVNNLNGLYDKDNDKLKKLINKSPEKLLMYHHDPQTYQKLKLIMEQYGDEKNPLYKYYEETGNYL |
| | TKYSKKDNGPVIKKIKYYGNKLNAHLDITDDYPNSRNKVVKLSLKPYRFDVYLDNGVYKFVTVKNLDVIKKE |
| | NYYEVNSKCYEEAKKLKKISNQAEFIASFYNNDLIKINGELYRVIGVNNDLLNRIEVNMIDITYREYLENMN |
| | DKRPPRIIKTIASKTQSIKKYSTDILGNLYEVKSKKHPQIIKKG |
| | (SEQ ID NO: 93) |
| Geobacillus | MKYKIGLDIGITSIGWAVINLDIPRIEDLGVRIFDRAENPKTGESLALPRRLARSARRRLRRRKHRLERIRR |
| thermodenit- | LFVREGILTKEELNKLFEKKHEIDVWQLRVEALDRKLNNDELARILLHLAKRRGFRSNRKSERTNKENSTML |
| rifleans | KHIEENQSILSSYRTVAEMVVKDPKFSLHKRNKEDNYTNTVARDDLEREIKLIFAKQREYGNIVCTEAFEHE |
| Cas9 | YISIWASQRPFASKDDIEKKVGFCTFEPKEKRAPKATYTFQSFTVWEHINKLRLVSPGGIRALTDDERRLIY |
| | KQAFHKNKITFHDVRTLLNLPDDTRFKGLLYDRNTTLKENEKVRFLELGAYHKIRKAIDSVYGKGAAKSFRP |
| | IDFDTFGYALTMFKDDTDIRSYLRNEYEQNGKRMENLADKVYDEELIEELLNLSFSKFGHLSLKALRNILPY |
| | MEQGEVYSTACERAGYTFTGPKKKQKTVLLPNIPPIANPVVMRALTQARKVVNAIIKKYGSPVSIHIELARE |
| | LSQSFDERRKMQKEQEGNRKKNETAIRQLVEYGLTLNPTGLDIVKFKLWSEQNGKCAYSLQPIEIERLLEPG |
| | YTEVDHVIPYSRSLDDSYTNKVLVLTKENREKGNRTPAEYLGLGSERWQQFETFVLTNKQFSKKKRDRLLRL |
| | HYDENEENEFKNRNLNDTRYISRFLANFIREHLKFADSDDKQKVYTVNGRITAHLRSRWNFNKNREESNLHH |
| | AVDAAIVACTTPSDIARVTAFYQRREQNKELSKKTDPQFPQPWPHFADELQARLSKNPKESIKALNLGNYDN |
| | EKLESLQPVFVSRMPKRSITGAAHQETLRRYIGIDERSGKIQTVVKKKLSEIQLDKTGHFPMYGKESDPRTY |
| | EAIRQRLLEHNNDPKKAFQEPLYKPKKNGELGPIIRTIKIIDTTNQVIPLNDGKTVAYNSNIVRVDVFEKDG |
| | KYYCVPIYTIDMMKGILPNKAIEPNKPYSEWKEMTEDYTFRFSLYPNDLIRIEFPREKTIKTAVGEEIKIKD |
| | LFAYYQTIDSSNGGLSLVSHDNNFSLRSIGSRTLKRFEKYQVDVLGNIYKVRGEKRVGVASSSHSKAGETIR |
| | PL |
| | (SEQ ID NO: 94) |
| ScCas9 | MEKKYSIGLDIGTNSVGWAVITDDYKVPSKKFKVLGNTNRKSIKKNLMGALLFDSGETAEATRLKRTARRRY |
| S. canis | TRRKNRIRYLQEIFANEMAKLDDSFFQRLEESFLVEEDKKNERHPIFGNLADEVAYHRNYPTIYHLRKKLAD |
| 1375 AA | SPEKADLRLIYLALAHIIKFRGHFLIEGKLNAENSDVAKLFYQLIQTYNQLFEESPLDEIEVDAKGILSARL |
| 159.2 kDa | SKSKRLEKLIAVFPNEKKNGLFGNIIALALGLTPNFKSNFDLTEDAKLQLSKDTYDDDLDELLGQIGDQYAD |
| | LFSAAKNLSDAILLSDILRSNSEVTKAPLSASMVKRYDEHHQDLALLKTLVRQQFPEKYAEIFKDDTKNGYA |
| | GYVGIGIKHRKRTTKLATQEEFYKFIKPILEKMDGAEELLAKLNRDDLLRKQRTFDNGSIPHQIHLKELHAI |
| | LRRQEEFYPFLKENREKIEKILTFRIPYYVGPLARGNSRFAWLTRKSEEAITPWNFEEVVDKGASAQSFIER |
| | MTNFDEQLPNKKVLPKHSLLYEYFTVYNELTKVKYVTERMRKPEFLSGEQKKAIVDLLFKTNRKVTVKQLKE |
| | DYFKKIECFDSVEIIGVEDRFNASLGTYHDLLKIIKDKDFLDNEENEDILEDIVLTLTLFEDREMIEERLKT |
| | YAHLFDDKVMKQLKRRHYTGWGRLSRKMINGIRDKQSGKTILDFLKSDGFSNRNFMQLIHDDSLTFKEEIEK |
| | AQVSGQGDSLHEQIADLAGSPAIKKGILQTVKIVDELVKVMGHKPENIVIEMARENQTTTKGLQQSRERKKR |
| | IEEGIKELESQILKENPVENTQLQNEKLYLYYLQNGRDMYVDQELDINRLSDYDVDHIVPQSFIKDDSIDNK |
| | VLTRSVENRGKSDNVPSEEVVKKMKNYWRQLLNAKLITQRKFDNLTKAERGGLSEADKAGFIKRQLVETRQI |
| | TKHVARILDSRMNTKRDKNDKPIREVKVITLKSKLVSDFRKDFQLYKVRDINNYHHAHDAYLNAVVGTALIK |
| | KYPKLESEFVYGDYKVYDVRKMIAKSEQEIGKATAKRFFYSNIMNFFKTEVKLANGEIRKRPLIETNGETGE |
| | VVWNKEKDFATVRKVLAMPQVNIVKKTEVQTGGFSKESILSKRESAKLIPRKKGWDTRKYGGFGSPTVAYSI |
| | LVVAKVEKGKAKKLKSVKVLVGITIMEKGSYEKDPIGFLEAKGYKDIKKELIFKLPKYSLFELENGRRRMLA |
| | SATELQKANELVLPQHLVRLLYYTQNISATTGSNNLGYIEQHREEFKEIFEKIIDFSEKYILKNKVNSNLKS |
| | SFDEQFAVSDSILLSNSFVSLLKYTSFGASGGFTFLDLDVKQGRLRYQTVTEVLDATLIYQSITGLYETRTD |
| | LSQLGGD (SEQ ID NO: 95) |

[0160] The base editors described herein may include any of the above Cas9 ortholog sequences, or any variants thereof having at least 80%, at least 85%, at least 90%, at least 95%, or at least 99% sequence identity thereto.

[0161] The napDNAbp may include any suitable homologs and/or orthologs or naturally occurring enzymes, such as, Cas9. Cas9 homologs and/or orthologs have been described in various species, including, but not limited to, S. pyogenes and S. therrnophilus. Preferably, the Cas moiety is configured (e.g., mutagenized, recombinantly engineered, or otherwise obtained from nature) as a nickase, i.e., capable of cleaving only a single strand of the target. Additional suitable Cas9 nucleases and sequences will be apparent to those of skill in the art based on this disclosure, and such Cas9 nucleases and sequences include Cas9 sequences from the organisms and loci disclosed in Chylinski, Rhun, and Charpentier, “The tracrRNA and Cas9 families of type II CRISPR-Cas immunity systems” (2013) RNA Biology 10:5, 726-737; the entire contents of which are incorporated herein by reference. In some embodiments, a Cas9 nuclease has an inactive (e.g., an inactivated) DNA cleavage domain, that is, the Cas9 is a nickase.In some embodiments, the Cas9 protein comprises an amino acid sequence that is at least 80% identical to the amino acid sequence of a Cas9 protein as provided by any one of the variants of Table 3. In some embodiments, the Cas9 protein comprises an amino acid sequence that is at least 85%, at least 90%, at least 92%, at least 95%, at least 96%, at least 97%, at least 98%, at least 99%, or at least 99.5% identical to the amino acid sequence of a Cas9 protein as provided by any one of the Cas9 orthologs in the above tables.

(iii) Dead Cas9 Variant

[0162] In certain embodiments, the base editors described herein may include a dead Cas9, e.g., dead SpCas9, which has no nuclease activity due to one or more mutations that inactive both nuclease domains of Cas9, namely the RuvC domain (which cleaves the non-protospacer DNA strand) and HNH domain (which cleaves the protospacer DNA strand). The nuclease inactivation may be due to one or mutations that result in one or more substitutions and/or deletions in the amino acid sequence of the encoded protein, or any variants thereof having at least 80%, at least 85%, at least 90%, at least 95%, or at least 99% sequence identity thereto.

[0163] As used herein, the term “dCas9” refers to a nuclease-inactive Cas9 or nuclease-dead Cas9, or a functional fragment thereof, and embraces any naturally occurring dCas9 from any organism, any naturally-occurring dCas9 equivalent or functional fragment thereof, any dCas9 homolog, ortholog, or paralog from any organism, and any mutant or variant of a dCas9, naturally-occurring or engineered. The term dCas9 is not meant to be particularly limiting and may be referred to as a “dCas9 or equivalent.” Exemplary dCas9 proteins and method for making dCas9 proteins are further described herein and/or are described in the art and are incorporated herein by reference.

[0164] In other embodiments, dCas9 corresponds to, or comprises in part or in whole, a Cas9 amino acid sequence having one or more mutations that inactivate the Cas9 nuclease activity. In other embodiments, Cas9 variants having mutations other than D10A and H840A are provided which may result in the full or partial inactivate of the endogenous Cas9 nuclease activity (e.g., nCas9 or dCas9, respectively). Such mutations, by way of example, include other amino acid substitutions at D10 and H820, or other substitutions within the nuclease domains of Cas9 (e.g., substitutions in the HNH nuclease subdomain and/or the RuvC1 subdomain) with reference to a wild type sequence such as Cas9 from Streptococcus pyogenes (NCBI Reference Sequence: NC_017053.1 (SEQ ID NOs: 76-77)). In some embodiments, variants or homologues of Cas9 (e.g., variants of Cas9 from Streptococcus pyogenes (NCBI Reference Sequence: NC_017053.1 (SEQ ID NOs: 76-77))) are provided which are at least about 70% identical, at least about 80% identical, at least about 90% identical, at least about 95% identical, at least about 98% identical, at least about 99% identical, at least about 99.5% identical, or at least about 99.9% identical to NCBI Reference Sequence: NC_017053.1. In some embodiments, variants of dCas9 (e.g., variants of NCBI Reference Sequence: NC_017053.1 (SEQ ID NOs: 76-77)) are provided having amino acid sequences which are shorter, or longer than NC_017053.1 (SEQ ID NOs: 76-77) by about 5 amino acids, by about 10 amino acids, by about 15 amino acids, by about 20 amino acids, by about 25 amino acids, by about 30 amino acids, by about 40 amino acids, by about 50 amino acids, by about 75 amino acids, by about 100 amino acids or more.

[0165] In one embodiment, the dead Cas9 may be based on the canonical SpCas9 sequence of Q99ZW2 and may have the following sequence, which comprises a DlOA and an H810A substitutions (underlined and bolded), or a variant of SEQ ID NO: 74 having at least 80%, at least 85%, at least 90%, at least 95%, or at least 99% sequence identity thereto:

| Description | Sequence | SEQ ID NO: |
|---|---|---|
| dead Cas9 or | MDKKYSIGLXIGTNSVGWAVITDEYKVPSKKFKVLGNTDRHSIKKNLIGALLFDSGE | SEQ ID NO: 100 |
| dCas9 | TAEATRLKRTARRRYTRRKNRICYLQEIFSNEMAKVDDSFFHRLEESFLVEEDKKHE | |
| Streptococcus | RHPIFGNIVDEVAYHEKYPTIYHLRKKLVDSTDKADLRLIYLALAHMIKFRGHFLIE | |
| pyogenes | GDLNPDNSDVDKLFIQLVQTYNQLFEENPINASGVDAKAILSARLSKSRRLENLIAQ | |
| Q99ZW2 Cas9 | LPGEKKNGLFGNLIALSLGLTPNFKSNFDLAEDAKLQLSKDTYDDDLDNLLAQIGDQ | |
| with D10X | YADLFLAAKNLSDAILLSDILRVNTEITKAPLSASMIKRYDEHHQDLTLLKALVRQQ | |
| and H810X | LPEKYKEIFFDQSKNGYAGYIDGGASQEEFYKFIKPILEKMDGTEELLVKLNREDLL | |
| Where “X” is | RKQRTFDNGSIPHQIHLGELHAILRRQEDFYPFLKDNREKIEKILTFRIPYYVGPLA | |
| any amino | RGNSRFAWMTRKSEETITPWNFEEVVDKGASAQSFIERMTNFDKNLPNEKVLPKHSL | |
| acid | LYEYFTVYNELTKVKYVTEGMRKPAFLSGEQKKAIVDLLFKTNRKVTVKQLKEDYFK | |
| | KIECFDSVEISGVEDRFNASLGTYHDLLKIIKDKDFLDNEENEDILEDIVLTLTLFE | |
| | DREMIEERLKTYAHLFDDKVMKQLKRRRYTGWGRLSRKLINGIRDKQSGKTILDFLK | |
| | SDGFANRNFMQLIHDDSLTFKEDIQKAQVSGQGDSLHEHIANLAGSPAIKKGILQTV | |
| | KVVDELVKVMGRHKPENIVIEMARENQTTQKGQKNSRERMKRIEEGIKELGSQILKE | |
| | HPVENTQLQNEKLYLYYLQNGRDMYVDQELDINRLSDYDVDXIVPQSFLKDDSIDNK | |
| | VLTRSDKNRGKSDNVPSEEVVKKMKNYWRQLLNAKLITQRKFDNLTKAERGGLSELD | |
| | KAGFIKRQLVETRQITKHVAQILDSRMNTKYDENDKLIREVKVITLKSKLVSDFRKD | |
| | FQFYKVREINNYHHAHDAYLNAVVGTALIKKYPKLESEFVYGDYKVYDVRKMIAKSE | |
| | QEIGKATAKYFFYSNIMNFFKTEITLANGEIRKRPLIETNGETGEIVWDKGRDFATV | |
| | RKVLSMPQVNIVKKTEVQTGGFSKESILPKRNSDKLIARKKDWDPKKYGGFDSPTVA | |
| | YSVLVVAKVEKGKSKKLKSVKELLGITIMERSSFEKNPIDFLEAKGYKEVKKDLIIK | |
| | LPKYSLFELENGRKRMLASAGELQKGNELALPSKYVNFLYLASHYEKLKGSPEDNEQ | |
| | KQLFVEQHKHYLDEIIEQISEFSKRVILADANLDKVLSAYNKHRDKPIREQAENIIH | |
| | LFTLTNLGAPAAFKYFDTTIDRKRYTSTKEVLDATLIHQSITGLYETRIDLSQLGGD | |
| dead Cas9 or | MDKKYSIGLAIGTNSVGWAVITDEYKVPSKKFKVLGNTDRHSIKKNLIGALLFDSGE | SEQ ID NO: 101 |
| dCas9 | TAEATRLKRTARRRYTRRKNRICYLQEIFSNEMAKVDDSFFHRLEESFLVEEDKKHE | |
| Streptococcus | RHPIFGNIVDEVAYHEKYPTIYHLRKKLVDSTDKADLRLIYLALAHMIKFRGHFLIE | |
| pyogenes | GDLNPDNSDVDKLFIQLVQTYNQLFEENPINASGVDAKAILSARLSKSRRLENLIAQ | |
| Q99ZW2 Cas9 | LPGEKKNGLFGNLIALSLGLTPNFKSNFDLAEDAKLQLSKDTYDDDLDNLLAQIGDQ | |
| with D10A | YADLFLAAKNLSDAILLSDILRVNTEITKAPLSASMIKRYDEHHQDLTLLKALVRQQ | |
| and H810A | LPEKYKEIFFDQSKNGYAGYIDGGASQEEFYKFIKPILEKMDGTEELLVKLNREDLL | |
| | RKQRTFDNGSIPHQIHLGELHAILRRQEDFYPFLKDNREKIEKILTFRIPYYVGPLA | |
| | RGNSRFAWMTRKSEETITPWNFEEVVDKGASAQSFIERMTNFDKNLPNEKVLPKHSL | |
| | LYEYFTVYNELTKVKYVTEGMRKPAFLSGEQKKAIVDLLFKTNRKVTVKQLKEDYFK | |
| | KIECFDSVEISGVEDRFNASLGTYHDLLKIIKDKDFLDNEENEDILEDIVLTLTLFE | |
| | DREMIEERLKTYAHLFDDKVMKQLKRRRYTGWGRLSRKLINGIRDKQSGKTILDFLK | |
| | SDGFANRNFMQLIHDDSLTFKEDIQKAQVSGQGDSLHEHIANLAGSPAIKKGILQTV | |
| | KVVDELVKVMGRHKPENIVIEMARENQTTQKGQKNSRERMKRIEEGIKELGSQILKE | |
| | HPVENTQLQNEKLYLYYLQNGRDMYVDQELDINRLSDYDVDAIVPQSFLKDDSIDNK | |
| | VLTRSDKNRGKSDNVPSEEVVKKMKNYWRQLLNAKLITQRKFDNLTKAERGGLSELD | |
| | KAGFIKRQLVETRQITKHVAQILDSRMNTKYDENDKLIREVKVITLKSKLVSDFRKD | |
| | FQFYKVREINNYHHAHDAYLNAVVGTALIKKYPKLESEFVYGDYKVYDVRKMIAKSE | |
| | QEIGKATAKYFFYSNIMNFFKTEITLANGEIRKRPLIETNGETGEIVWDKGRDFATV | |
| | RKVLSMPQVNIVKKTEVQTGGFSKESILPKRNSDKLIARKKDWDPKKYGGFDSPTVA | |
| | YSVLVVAKVEKGKSKKLKSVKELLGITIMERSSFEKNPIDFLEAKGYKEVKKDLIIK | |
| | LPKYSLFELENGRKRMLASAGELQKGNELALPSKYVNFLYLASHYEKLKGSPEDNEQ | |
| | KQLFVEQHKHYLDEIIEQISEFSKRVILADANLDKVLSAYNKHRDKPIREQAENIIH | |
| | LFTLTNLGAPAAFKYFDTTIDRKRYTSTKEVLDATLIHQSITGLYETRIDLSQLGGD | |

### (iv) Cas9 Nickase Variant

[0166] In one embodiment, the base editors described herein comprise a Cas9 nickase. The term “Cas9 nickase” of “nCas9” refers to a variant of Cas9 which is capable of introducing a single-strand break in a double strand DNA molecule target. In some embodiments, the Cas9 nickase comprises only a single functioning nuclease domain. The wild type Cas9 (e.g., the canonical SpCas9) comprises two separate nuclease domains, namely, the RuvC domain (which cleaves the non-protospacer DNA strand) and HNH domain (which cleaves the protospacer DNA strand). In one embodiment, the Cas9 nickase comprises a mutation in the RuvC domain which inactivates the RuvC nuclease activity. For example, mutations in aspartate (D) 10, histidine (H) 983, aspartate (D) 986, or glutamate (E) 762, have been reported as loss-of-function mutations of the RuvC nuclease domain and the creation of a functional Cas9 nickase (e.g., Nishimasu et al., “Crystal structure of Cas9 in complex with guide RNA and target DNA,” Cell 156(5), 935-949, which is incorporated herein by reference). Thus, nickase mutations in the RuvC domain could include D10X, H983X, D986X, or E762X, wherein X is any amino acid other than the wild type amino acid. In certain embodiments, the nickase could be D10A, of H983A, or D986A, or E762A, or a combination thereof. Exemplary nickases include the SpCas9 nickases having the amino acid sequences as set forth in SEQ ID NOs: 102 and 107. In some embodiments, the disclosed base editors and base editor complexes comprise a nickase comprising a sequence having at least 98% or at least 99% identity to SEQ ID NO: 107. In some embodiments, the disclosed base editors and base editor complexes comprise a nickase comprising a sequence having at least 98% or at least 99% identity to SEQ ID NO: 102.

[0167] In various embodiments, the Cas9 nickase can having a mutation in the RuvC nuclease domain and have one of the following amino acid sequences, or a variant thereof having an amino acid sequence that has at least 80%, at least 85%, at least 90%, at least 95%, or at least 99% sequence identity thereto.

| Description | Sequence | SEQ ID NO: |
|---|---|---|
| Cas9 nickase | MDKKYSIGLXIGTNSVGWAVITDEYKVPSKKFKVLGNTDRHSIKKNLIGALLFDSGE | SEQ ID NO: 98 |
| Streptococcus | TAEATRLKRTARRRYTRRKNRICYLQEIFSNEMAKVDDSFFHRLEESFLVEEDKKHE | |
| pyogenes | RHPIFGNIVDEVAYHEKYPTIYHLRKKLVDSTDKADLRLIYLALAHMIKFRGHFLIE | |
| Q99ZW2 Cas9 | GDLNPDNSDVDKLFIQLVQTYNQLFEENPINASGVDAKAILSARLSKSRRLENLIAQ | |
| with D10X, | LPGEKKNGLFGNLIALSLGLTPNFKSNFDLAEDAKLQLSKDTYDDDLDNLLAQIGDQ | |
| wherein X is | YADLFLAAKNLSDAILLSDILRVNTEITKAPLSASMIKRYDEHHQDLTLLKALVRQQ | |
| any | LPEKYKEIFFDQSKNGYAGYIDGGASQEEFYKFIKPILEKMDGTEELLVKLNREDLL | |
| alternate | RKQRTFDNGSIPHQIHLGELHAILRRQEDFYPFLKDNREKIEKILTFRIPYYVGPLA | |
| amino acid | RGNSRFAWMTRKSEETITPWNFEEVVDKGASAQSFIERMTNFDKNLPNEKVLPKHSL | |
| | LYEYFTVYNELTKVKYVTEGMRKPAFLSGEQKKAIVDLLFKTNRKVTVKQLKEDYFK | |
| | KIECFDSVEISGVEDRFNASLGTYHDLLKIIKDKDFLDNEENEDILEDIVLTLTLFE | |
| | DREMIEERLKTYAHLFDDKVMKQLKRRRYTGWGRLSRKLINGIRDKQSGKTILDFLK | |
| | SDGFANRNFMQLIHDDSLTFKEDIQKAQVSGQGDSLHEHIANLAGSPAIKKGILQTV | |
| | KVVDELVKVMGRHKPENIVIEMARENQTTQKGQKNSRERMKRIEEGIKELGSQILKE | |
| | HPVENTQLQNEKLYLYYLQNGRDMYVDQELDINRLSDYDVDHIVPQSFLKDDSIDNK | |
| | VLTRSDKNRGKSDNVPSEEVVKKMKNYWRQLLNAKLITQRKFDNLTKAERGGLSELD | |
| | KAGFIKRQLVETRQITKHVAQILDSRMNTKYDENDKLIREVKVITLKSKLVSDFRKD | |
| | FQFYKVREINNYHHAHDAYLNAVVGTALIKKYPKLESEFVYGDYKVYDVRKMIAKSE | |
| | QEIGKATAKYFFYSNIMNFFKTEITLANGEIRKRPLIETNGETGEIVWDKGRDFATV | |
| | RKVLSMPQVNIVKKTEVQTGGFSKESILPKRNSDKLIARKKDWDPKKYGGFDSPTVA | |
| | YSVLVVAKVEKGKSKKLKSVKELLGITIMERSSFEKNPIDFLEAKGYKEVKKDLIIK | |
| | LPKYSLFELENGRKRMLASAGELQKGNELALPSKYVNFLYLASHYEKLKGSPEDNEQ | |
| | KQLFVEQHKHYLDEIIEQISEFSKRVILADANLDKVLSAYNKHRDKPIREQAENIIH | |
| | LFTLTNLGAPAAFKYFDTTIDRKRYTSTKEVLDATLIHQSITGLYETRIDLSQLGGD | |
| Cas9 nickase | MDKKYSIGLDIGTNSVGWAVITDEYKVPSKKFKVLGNTDRHSIKKNLIGALLFDSGE | SEQ ID NO: 99 |
| Streptococcus | TAEATRLKRTARRRYTRRKNRICYLQEIFSNEMAKVDDSFFHRLEESFLVEEDKKHE | |
| pyogenes | RHPIFGNIVDEVAYHEKYPTIYHLRKKLVDSTDKADLRLIYLALAHMIKFRGHFLIE | |
| Q99ZW2 Cas9 | GDLNPDNSDVDKLFIQLVQTYNQLFEENPINASGVDAKAILSARLSKSRRLENLIAQ | |
| with E762X, | LPGEKKNGLFGNLIALSLGLTPNFKSNFDLAEDAKLQLSKDTYDDDLDNLLAQIGDQ | |
| wherein X is | YADLFLAAKNLSDAILLSDILRVNTEITKAPLSASMIKRYDEHHQDLTLLKALVRQQ | |
| any | LPEKYKEIFFDQSKNGYAGYIDGGASQEEFYKFIKPILEKMDGTEELLVKLNREDLL | |
| alternate | RKQRTFDNGSIPHQIHLGELHAILRRQEDFYPFLKDNREKIEKILTFRIPYYVGPLA | |
| amino acid | RGNSRFAWMTRKSEETITPWNFEEVVDKGASAQSFIERMTNFDKNLPNEKVLPKHSL | |
| | LYEYFTVYNELTKVKYVTEGMRKPAFLSGEQKKAIVDLLFKTNRKVTVKQLKEDYFK | |
| | KIECFDSVEISGVEDRFNASLGTYHDLLKIIKDKDFLDNEENEDILEDIVLTLTLFE | |
| | DREMIEERLKTYAHLFDDKVMKQLKRRRYTGWGRLSRKLINGIRDKQSGKTILDFLK | |
| | SDGFANRNFMQLIHDDSLTFKEDIQKAQVSGQGDSLHEHIANLAGSPAIKKGILQTV | |
| | KVVDELVKVMGRHKPENIVIXMARENQTTQKGQKNSRERMKRIEEGIKELGSQILKE | |
| | HPVENTQLQNEKLYLYYLQNGRDMYVDQELDINRLSDYDVDHIVPQSFLKDDSIDNK | |
| | VLTRSDKNRGKSDNVPSEEVVKKMKNYWRQLLNAKLITQRKFDNLTKAERGGLSELD | |
| | KAGFIKRQLVETRQITKHVAQILDSRMNTKYDENDKLIREVKVITLKSKLVSDFRKD | |
| | FQFYKVREINNYHHAHDAYLNAVVGTALIKKYPKLESEFVYGDYKVYDVRKMIAKSE | |
| | QEIGKATAKYFFYSNIMNFFKTEITLANGEIRKRPLIETNGETGEIVWDKGRDFATV | |
| | RKVLSMPQVNIVKKTEVQTGGFSKESILPKRNSDKLIARKKDWDPKKYGGFDSPTVA | |
| | YSVLVVAKVEKGKSKKLKSVKELLGITIMERSSFEKNPIDFLEAKGYKEVKKDLIIK | |
| | LPKYSLFELENGRKRMLASAGELQKGNELALPSKYVNFLYLASHYEKLKGSPEDNEQ | |
| | KQLFVEQHKHYLDEIIEQISEFSKRVILADANLDKVLSAYNKHRDKPIREQAENIIH | |
| | LFTLTNLGAPAAFKYFDTTIDRKRYTSTKEVLDATLIHQSITGLYETRIDLSQLGGD | |
| Cas9 nickase | MDKKYSIGLDIGTNSVGWAVITDEYKVPSKKFKVLGNTDRHSIKKNLIGALLFDSGE | SEQ ID NO: |
| Streptococcus | TAEATRLKRTARRRYTRRKNRICYLQEIFSNEMAKVDDSFFHRLEESFLVEEDKKHE | 100 |
| pyogenes | RHPIFGNIVDEVAYHEKYPTIYHLRKKLVDSTDKADLRLIYLALAHMIKFRGHFLIE | |
| Q99ZW2 Cas9 | GDLNPDNSDVDKLFIQLVQTYNQLFEENPINASGVDAKAILSARLSKSRRLENLIAQ | |
| with H983X, | LPGEKKNGLFGNLIALSLGLTPNFKSNFDLAEDAKLQLSKDTYDDDLDNLLAQIGDQ | |
| wherein X is | YADLFLAAKNLSDAILLSDILRVNTEITKAPLSASMIKRYDEHHQDLTLLKALVRQQ | |
| any | LPEKYKEIFFDQSKNGYAGYIDGGASQEEFYKFIKPILEKMDGTEELLVKLNREDLL | |
| alternate | RKQRTFDNGSIPHQIHLGELHAILRRQEDFYPFLKDNREKIEKILTFRIPYYVGPLA | |
| amino acid | RGNSRFAWMTRKSEETITPWNFEEVVDKGASAQSFIERMTNFDKNLPNEKVLPKHSL | |
| | LYEYFTVYNELTKVKYVTEGMRKPAFLSGEQKKAIVDLLFKTNRKVTVKQLKEDYFK | |
| | KIECFDSVEISGVEDRFNASLGTYHDLLKIIKDKDFLDNEENEDILEDIVLTLTLFE | |
| | DREMIEERLKTYAHLFDDKVMKQLKRRRYTGWGRLSRKLINGIRDKQSGKTILDFLK | |
| | SDGFANRNFMQLIHDDSLTFKEDIQKAQVSGQGDSLHEHIANLAGSPAIKKGILQTV | |
| | KVVDELVKVMGRHKPENIVIEMARENQTTQKGQKNSRERMKRIEEGIKELGSQILKE | |
| | HPVENTQLQNEKLYLYYLQNGRDMYVDQELDINRLSDYDVDHIVPQSFLKDDSIDNK | |
| | VLTRSDKNRGKSDNVPSEEVVKKMKNYWRQLLNAKLITQRKFDNLTKAERGGLSELD | |
| | KAGFIKRQLVETRQITKHVAQILDSRMNTKYDENDKLIREVKVITLKSKLVSDFRKD | |
| | FQFYKVREINNYHXAHDAYLNAVVGTALIKKYPKLESEFVYGDYKVYDVRKMIAKSE | |
| | QEIGKATAKYFFYSNIMNFFKTEITLANGEIRKRPLIETNGETGEIVWDKGRDFATV | |
| | RKVLSMPQVNIVKKTEVQTGGFSKESILPKRNSDKLIARKKDWDPKKYGGFDSPTVA | |
| | YSVLVVAKVEKGKSKKLKSVKELLGITIMERSSFEKNPIDFLEAKGYKEVKKDLIIK | |
| | LPKYSLFELENGRKRMLASAGELQKGNELALPSKYVNFLYLASHYEKLKGSPEDNEQ | |
| | KQLFVEQHKHYLDEIIEQISEFSKRVILADANLDKVLSAYNKHRDKPIREQAENIIH | |
| | LFTLTNLGAPAAFKYFDTTIDRKRYTSTKEVLDATLIHQSITGLYETRIDLSQLGGD | |
| Cas9 nickase | MDKKYSIGLDIGTNSVGWAVITDEYKVPSKKFKVLGNTDRHSIKKNLIGALLFDSGE | SEQ ID NO: |
| Streptococcus | TAEATRLKRTARRRYTRRKNRICYLQEIFSNEMAKVDDSFFHRLEESFLVEEDKKHE | 101 |
| pyogenes | RHPIFGNIVDEVAYHEKYPTIYHLRKKLVDSTDKADLRLIYLALAHMIKFRGHFLIE | |
| Q99ZW2 Cas9 | GDLNPDNSDVDKLFIQLVQTYNQLFEENPINASGVDAKAILSARLSKSRRLENLIAQ | |
| with D986X, | LPGEKKNGLFGNLIALSLGLTPNFKSNFDLAEDAKLQLSKDTYDDDLDNLLAQIGDQ | |
| wherein X is | YADLFLAAKNLSDAILLSDILRVNTEITKAPLSASMIKRYDEHHQDLTLLKALVRQQ | |
| any | LPEKYKEIFFDQSKNGYAGYIDGGASQEEFYKFIKPILEKMDGTEELLVKLNREDLL | |
| alternate | RKQRTFDNGSIPHQIHLGELHAILRRQEDFYPFLKDNREKIEKILTFRIPYYVGPLA | |
| amino acid | RGNSRFAWMTRKSEETITPWNFEEVVDKGASAQSFIERMTNFDKNLPNEKVLPKHSL | |
| | LYEYFTVYNELTKVKYVTEGMRKPAFLSGEQKKAIVDLLFKTNRKVTVKQLKEDYFK | |
| | KIECFDSVEISGVEDRFNASLGTYHDLLKIIKDKDFLDNEENEDILEDIVLTLTLFE | |
| | DREMIEERLKTYAHLFDDKVMKQLKRRRYTGWGRLSRKLINGIRDKQSGKTILDFLK | |
| | SDGFANRNFMQLIHDDSLTFKEDIQKAQVSGQGDSLHEHIANLAGSPAIKKGILQTV | |
| | KVVDELVKVMGRHKPENIVIEMARENQTTQKGQKNSRERMKRIEEGIKELGSQILKE | |
| | HPVENTQLQNEKLYLYYLQNGRDMYVDQELDINRLSDYDVDHIVPQSFLKDDSIDNK | |
| | VLTRSDKNRGKSDNVPSEEVVKKMKNYWRQLLNAKLITQRKFDNLTKAERGGLSELD | |
| | KAGFIKRQLVETRQITKHVAQILDSRMNTKYDENDKLIREVKVITLKSKLVSDFRKD | |
| | FQFYKVREINNYHHAHXAYLNAVVGTALIKKYPKLESEFVYGDYKVYDVRKMIAKSE | |
| | QEIGKATAKYFFYSNIMNFFKTEITLANGEIRKRPLIETNGETGEIVWDKGRDFATV | |
| | RKVLSMPQVNIVKKTEVQTGGFSKESILPKRNSDKLIARKKDWDPKKYGGFDSPTVA | |
| | YSVLVVAKVEKGKSKKLKSVKELLGITIMERSSFEKNPIDFLEAKGYKEVKKDLIIK | |
| | LPKYSLFELENGRKRMLASAGELQKGNELALPSKYVNFLYLASHYEKLKGSPEDNEQ | |
| | KQLFVEQHKHYLDEIIEQISEFSKRVILADANLDKVLSAYNKHRDKPIREQAENIIH | |
| | LFTLTNLGAPAAFKYFDTTIDRKRYTSTKEVLDATLIHQSITGLYETRIDLSQLGGD | |
| Cas9 nickase | MDKKYSIGLAIGTNSVGWAVITDEYKVPSKKFKVLGNTDRHSIKKNLIGALLFDSGE | SEQ ID NO: |
| Streptococcus | TAEATRLKRTARRRYTRRKNRICYLQEIFSNEMAKVDDSFFHRLEESFLVEEDKKHE | 102 |
| pyogenes | RHPIFGNIVDEVAYHEKYPTIYHLRKKLVDSTDKADLRLIYLALAHMIKFRGHFLIE | |
| Q99ZW2 Cas9 | GDLNPDNSDVDKLFIQLVQTYNQLFEENPINASGVDAKAILSARLSKSRRLENLIAQ | |
| with D10A | LPGEKKNGLFGNLIALSLGLTPNFKSNFDLAEDAKLQLSKDTYDDDLDNLLAQIGDQ | |
| | YADLFLAAKNLSDAILLSDILRVNTEITKAPLSASMIKRYDEHHQDLTLLKALVRQQ | |
| | LPEKYKEIFFDQSKNGYAGYIDGGASQEEFYKFIKPILEKMDGTEELLVKLNREDLL | |
| | RKQRTFDNGSIPHQIHLGELHAILRRQEDFYPFLKDNREKIEKILTFRIPYYVGPLA | |
| | RGNSRFAWMTRKSEETITPWNFEEVVDKGASAQSFIERMTNFDKNLPNEKVLPKHSL | |
| | LYEYFTVYNELTKVKYVTEGMRKPAFLSGEQKKAIVDLLFKTNRKVTVKQLKEDYFK | |
| | KIECFDSVEISGVEDRFNASLGTYHDLLKIIKDKDFLDNEENEDILEDIVLTLTLFE | |
| | DREMIEERLKTYAHLFDDKVMKQLKRRRYTGWGRLSRKLINGIRDKQSGKTILDFLK | |
| | SDGFANRNFMQLIHDDSLTFKEDIQKAQVSGQGDSLHEHIANLAGSPAIKKGILQTV | |
| | KVVDELVKVMGRHKPENIVIEMARENQTTQKGQKNSRERMKRIEEGIKELGSQILKE | |
| | HPVENTQLQNEKLYLYYLQNGRDMYVDQELDINRLSDYDVDHIVPQSFLKDDSIDNK | |
| | VLTRSDKNRGKSDNVPSEEVVKKMKNYWRQLLNAKLITQRKFDNLTKAERGGLSELD | |
| | KAGFIKRQLVETRQITKHVAQILDSRMNTKYDENDKLIREVKVITLKSKLVSDFRKD | |
| | FQFYKVREINNYHHAHDAYLNAVVGTALIKKYPKLESEFVYGDYKVYDVRKMIAKSE | |
| | QEIGKATAKYFFYSNIMNFFKTEITLANGEIRKRPLIETNGETGEIVWDKGRDFATV | |
| | RKVLSMPQVNIVKKTEVQTGGFSKESILPKRNSDKLIARKKDWDPKKYGGFDSPTVA | |
| | YSVLVVAKVEKGKSKKLKSVKELLGITIMERSSFEKNPIDFLEAKGYKEVKKDLIIK | |
| | LPKYSLFELENGRKRMLASAGELQKGNELALPSKYVNFLYLASHYEKLKGSPEDNEQ | |
| | KQLFVEQHKHYLDEIIEQISEFSKRVILADANLDKVLSAYNKHRDKPIREQAENIIH | |
| | LFTLTNLGAPAAFKYFDTTIDRKRYTSTKEVLDATLIHQSITGLYETRIDLSQLGGD | |
| Cas9 nickase | MDKKYSIGLDIGTNSVGWAVITDEYKVPSKKFKVLGNTDRHSIKKNLIGALLFDSGE | SEQ ID NO: |
| Streptococcus | TAEATRLKRTARRRYTRRKNRICYLQEIFSNEMAKVDDSFFHRLEESFLVEEDKKHE | 103 |
| pyogenes | RHPIFGNIVDEVAYHEKYPTIYHLRKKLVDSTDKADLRLIYLALAHMIKFRGHFLIE | |
| Q99ZW2 Cas9 | GDLNPDNSDVDKLFIQLVQTYNQLFEENPINASGVDAKAILSARLSKSRRLENLIAQ | |
| with E762A | LPGEKKNGLFGNLIALSLGLTPNFKSNFDLAEDAKLQLSKDTYDDDLDNLLAQIGDQ | |
| | YADLFLAAKNLSDAILLSDILRVNTEITKAPLSASMIKRYDEHHQDLTLLKALVRQQ | |
| | LPEKYKEIFFDQSKNGYAGYIDGGASQEEFYKFIKPILEKMDGTEELLVKLNREDLL | |
| | RKQRTFDNGSIPHQIHLGELHAILRRQEDFYPFLKDNREKIEKILTFRIPYYVGPLA | |
| | RGNSRFAWMTRKSEETITPWNFEEVVDKGASAQSFIERMTNFDKNLPNEKVLPKHSL | |
| | LYEYFTVYNELTKVKYVTEGMRKPAFLSGEQKKAIVDLLFKTNRKVTVKQLKEDYFK | |
| | KIECFDSVEISGVEDRFNASLGTYHDLLKIIKDKDFLDNEENEDILEDIVLTLTLFE | |
| | DREMIEERLKTYAHLFDDKVMKQLKRRRYTGWGRLSRKLINGIRDKQSGKTILDFLK | |
| | SDGFANRNFMQLIHDDSLTFKEDIQKAQVSGQGDSLHEHIANLAGSPAIKKGILQTV | |
| | KVVDELVKVMGRHKPENIVIAMARENQTTQKGQKNSRERMKRIEEGIKELGSQILKE | |
| | HPVENTQLQNEKLYLYYLQNGRDMYVDQELDINRLSDYDVDHIVPQSFLKDDSIDNK | |
| | VLTRSDKNRGKSDNVPSEEVVKKMKNYWRQLLNAKLITQRKFDNLTKAERGGLSELD | |
| | KAGFIKRQLVETRQITKHVAQILDSRMNTKYDENDKLIREVKVITLKSKLVSDFRKD | |
| | FQFYKVREINNYHHAHDAYLNAVVGTALIKKYPKLESEFVYGDYKVYDVRKMIAKSE | |
| | QEIGKATAKYFFYSNIMNFFKTEITLANGEIRKRPLIETNGETGEIVWDKGRDFATV | |
| | RKVLSMPQVNIVKKTEVQTGGFSKESILPKRNSDKLIARKKDWDPKKYGGFDSPTVA | |
| | YSVLVVAKVEKGKSKKLKSVKELLGITIMERSSFEKNPIDFLEAKGYKEVKKDLIIK | |
| | LPKYSLFELENGRKRMLASAGELQKGNELALPSKYVNFLYLASHYEKLKGSPEDNEQ | |
| | KQLFVEQHKHYLDEIIEQISEFSKRVILADANLDKVLSAYNKHRDKPIREQAENIIH | |
| | LFTLTNLGAPAAFKYFDTTIDRKRYTSTKEVLDATLIHQSITGLYETRIDLSQLGGD | |
| Cas9 nickase | MDKKYSIGLDIGTNSVGWAVITDEYKVPSKKFKVLGNTDRHSIKKNLIGALLFDSGE | SEQ ID NO: |
| Streptococcus | TAEATRLKRTARRRYTRRKNRICYLQEIFSNEMAKVDDSFFHRLEESFLVEEDKKHE | 104 |
| pyogenes | RHPIFGNIVDEVAYHEKYPTIYHLRKKLVDSTDKADLRLIYLALAHMIKFRGHFLIE | |
| Q99ZW2 Cas9 | GDLNPDNSDVDKLFIQLVQTYNQLFEENPINASGVDAKAILSARLSKSRRLENLIAQ | |
| with H983A | LPGEKKNGLFGNLIALSLGLTPNFKSNFDLAEDAKLQLSKDTYDDDLDNLLAQIGDQ | |
| | YADLFLAAKNLSDAILLSDILRVNTEITKAPLSASMIKRYDEHHQDLTLLKALVRQQ | |
| | LPEKYKEIFFDQSKNGYAGYIDGGASQEEFYKFIKPILEKMDGTEELLVKLNREDLL | |
| | RKQRTFDNGSIPHQIHLGELHAILRRQEDFYPFLKDNREKIEKILTFRIPYYVGPLA | |
| | RGNSRFAWMTRKSEETITPWNFEEVVDKGASAQSFIERMTNFDKNLPNEKVLPKHSL | |
| | LYEYFTVYNELTKVKYVTEGMRKPAFLSGEQKKAIVDLLFKTNRKVTVKQLKEDYFK | |
| | KIECFDSVEISGVEDRFNASLGTYHDLLKIIKDKDFLDNEENEDILEDIVLTLTLFE | |
| | DREMIEERLKTYAHLFDDKVMKQLKRRRYTGWGRLSRKLINGIRDKQSGKTILDFLK | |
| | SDGFANRNFMQLIHDDSLTFKEDIQKAQVSGQGDSLHEHIANLAGSPAIKKGILQTV | |
| | KVVDELVKVMGRHKPENIVIEMARENQTTQKGQKNSRERMKRIEEGIKELGSQILKE | |
| | HPVENTQLQNEKLYLYYLQNGRDMYVDQELDINRLSDYDVDHIVPQSFLKDDSIDNK | |
| | VLTRSDKNRGKSDNVPSEEVVKKMKNYWRQLLNAKLITQRKFDNLTKAERGGLSELD | |
| | KAGFIKRQLVETRQITKHVAQILDSRMNTKYDENDKLIREVKVITLKSKLVSDFRKD | |
| | FQFYKVREINNYHAAHDAYLNAVVGTALIKKYPKLESEFVYGDYKVYDVRKMIAKSE | |
| | QEIGKATAKYFFYSNIMNFFKTEITLANGEIRKRPLIETNGETGEIVWDKGRDFATV | |
| | RKVLSMPQVNIVKKTEVQTGGFSKESILPKRNSDKLIARKKDWDPKKYGGFDSPTVA | |
| | YSVLVVAKVEKGKSKKLKSVKELLGITIMERSSFEKNPIDFLEAKGYKEVKKDLIIK | |
| | LPKYSLFELENGRKRMLASAGELQKGNELALPSKYVNFLYLASHYEKLKGSPEDNEQ | |
| | KQLFVEQHKHYLDEIIEQISEFSKRVILADANLDKVLSAYNKHRDKPIREQAENIIH | |
| | LFTLTNLGAPAAFKYFDTTIDRKRYTSTKEVLDATLIHQSITGLYETRIDLSQLGGD | |
| Cas9 nickase | MDKKYSIGLDIGTNSVGWAVITDEYKVPSKKFKVLGNTDRHSIKKNLIGALLFDSGE | SEQ ID NO: |
| Streptococcus | TAEATRLKRTARRRYTRRKNRICYLQEIFSNEMAKVDDSFFHRLEESFLVEEDKKHE | 105 |
| pyogenes | RHPIFGNIVDEVAYHEKYPTIYHLRKKLVDSTDKADLRLIYLALAHMIKFRGHFLIE | |
| Q99ZW2 Cas9 | GDLNPDNSDVDKLFIQLVQTYNQLFEENPINASGVDAKAILSARLSKSRRLENLIAQ | |
| with D986A | LPGEKKNGLFGNLIALSLGLTPNFKSNFDLAEDAKLQLSKDTYDDDLDNLLAQIGDQ | |
| | YADLFLAAKNLSDAILLSDILRVNTEITKAPLSASMIKRYDEHHQDLTLLKALVRQQ | |
| | LPEKYKEIFFDQSKNGYAGYIDGGASQEEFYKFIKPILEKMDGTEELLVKLNREDLL | |
| | RKQRTFDNGSIPHQIHLGELHAILRRQEDFYPFLKDNREKIEKILTFRIPYYVGPLA | |
| | RGNSRFAWMTRKSEETITPWNFEEVVDKGASAQSFIERMTNFDKNLPNEKVLPKHSL | |
| | LYEYFTVYNELTKVKYVTEGMRKPAFLSGEQKKAIVDLLFKTNRKVTVKQLKEDYFK | |
| | KIECFDSVEISGVEDRFNASLGTYHDLLKIIKDKDFLDNEENEDILEDIVLTLTLFE | |
| | DREMIEERLKTYAHLFDDKVMKQLKRRRYTGWGRLSRKLINGIRDKQSGKTILDFLK | |
| | SDGFANRNFMQLIHDDSLTFKEDIQKAQVSGQGDSLHEHIANLAGSPAIKKGILQTV | |
| | KVVDELVKVMGRHKPENIVIEMARENQTTQKGQKNSRERMKRIEEGIKELGSQILKE | |
| | HPVENTQLQNEKLYLYYLQNGRDMYVDQELDINRLSDYDVDHIVPQSFLKDDSIDNK | |
| | VLTRSDKNRGKSDNVPSEEVVKKMKNYWRQLLNAKLITQRKFDNLTKAERGGLSELD | |
| | KAGFIKRQLVETRQITKHVAQILDSRMNTKYDENDKLIREVKVITLKSKLVSDFRKD | |
| | FQFYKVREINNYHHAHAAYLNAVVGTALIKKYPKLESEFVYGDYKVYDVRKMIAKSE | |
| | QEIGKATAKYFFYSNIMNFFKTEITLANGEIRKRPLIETNGETGEIVWDKGRDFATV | |
| | RKVLSMPQVNIVKKTEVQTGGFSKESILPKRNSDKLIARKKDWDPKKYGGFDSPTVA | |
| | YSVLVVAKVEKGKSKKLKSVKELLGITIMERSSFEKNPIDFLEAKGYKEVKKDLIIK | |
| | LPKYSLFELENGRKRMLASAGELQKGNELALPSKYVNFLYLASHYEKLKGSPEDNEQ | |
| | KQLFVEQHKHYLDEIIEQISEFSKRVILADANLDKVLSAYNKHRDKPIREQAENIIH | |
| | LFTLTNLGAPAAFKYFDTTIDRKRYTSTKEVLDATLIHQSITGLYETRIDLSQLGGD | |

[0168] In another embodiment, the Cas9 nickase comprises a mutation in the HNH domain which inactivates the HNH nuclease activity. For example, mutations in histidine (H) 840 or asparagine (R) 863 have been reported as loss-of-function mutations of the HNH nuclease domain and the creation of a functional Cas9 nickase (e.g., Nishimasu et al., “Crystal structure of Cas9 in complex with guide RNA and target DNA,” Cell 156(5), 935-949, which is incorporated herein by reference). Thus, nickase mutations in the HNH domain could include H840X and R863X, wherein X is any amino acid other than the wild type amino acid. In certain embodiments, the nickase could be H840A or R863A or a combination thereof.

[0169] In various embodiments, the Cas9 nickase can have a mutation in the HNH nuclease domain and have one of the following amino acid sequences, or a variant thereof having an amino acid sequence that has at least 80%, at least 85%, at least 90%, at least 95%, or at least 99% sequence identity thereto.

| Description | Sequence | SEQ ID NO: |
|---|---|---|
| Cas9 nickase | MDKKYSIGLDIGTNSVGWAVITDEYKVPSKKFKVLGNTDRHSIKKNLIGALLFDSGE | SEQ ID NO: |
| Streptococcus | TAEATRLKRTARRRYTRRKNRICYLQEIFSNEMAKVDDSFFHRLEESFLVEEDKKHE | 106 |
| pyogenes | RHPIFGNIVDEVAYHEKYPTIYHLRKKLVDSTDKADLRLIYLALAHMIKFRGHFLIE | |
| Q99ZW2 Cas9 | GDLNPDNSDVDKLFIQLVQTYNQLFEENPINASGVDAKAILSARLSKSRRLENLIAQ | |
| with H840X, | LPGEKKNGLFGNLIALSLGLTPNFKSNFDLAEDAKLQLSKDTYDDDLDNLLAQIGDQ | |
| wherein X is | YADLFLAAKNLSDAILLSDILRVNTEITKAPLSASMIKRYDEHHQDLTLLKALVRQQ | |
| any | LPEKYKEIFFDQSKNGYAGYIDGGASQEEFYKFIKPILEKMDGTEELLVKLNREDLL | |
| alternate | RKQRTFDNGSIPHQIHLGELHAILRRQEDFYPFLKDNREKIEKILTFRIPYYVGPLA | |
| amino acid | RGNSRFAWMTRKSEETITPWNFEEVVDKGASAQSFIERMTNFDKNLPNEKVLPKHSL | |
| | LYEYFTVYNELTKVKYVTEGMRKPAFLSGEQKKAIVDLLFKTNRKVTVKQLKEDYFK | |
| | KIECFDSVEISGVEDRFNASLGTYHDLLKIIKDKDFLDNEENEDILEDIVLTLTLFE | |
| | DREMIEERLKTYAHLFDDKVMKQLKRRRYTGWGRLSRKLINGIRDKQSGKTILDFLK | |
| | SDGFANRNFMQLIHDDSLTFKEDIQKAQVSGQGDSLHEHIANLAGSPAIKKGILQTV | |
| | KVVDELVKVMGRHKPENIVIEMARENQTTQKGQKNSRERMKRIEEGIKELGSQILKE | |
| | HPVENTQLQNEKLYLYYLQNGRDMYVDQELDINRLSDYDVDXIVPQSFLKDDSIDNK | |
| | VLTRSDKNRGKSDNVPSEEVVKKMKNYWRQLLNAKLITQRKFDNLTKAERGGLSELD | |
| | KAGFIKRQLVETRQITKHVAQILDSRMNTKYDENDKLIREVKVITLKSKLVSDFRKD | |
| | FQFYKVREINNYHHAHDAYLNAVVGTALIKKYPKLESEFVYGDYKVYDVRKMIAKSE | |
| | QEIGKATAKYFFYSNIMNFFKTEITLANGEIRKRPLIETNGETGEIVWDKGRDFATV | |
| | RKVLSMPQVNIVKKTEVQTGGFSKESILPKRNSDKLIARKKDWDPKKYGGFDSPTVA | |
| | YSVLVVAKVEKGKSKKLKSVKELLGITIMERSSFEKNPIDFLEAKGYKEVKKDLIIK | |
| | LPKYSLFELENGRKRMLASAGELQKGNELALPSKYVNFLYLASHYEKLKGSPEDNEQ | |
| | KQLFVEQHKHYLDEIIEQISEFSKRVILADANLDKVLSAYNKHRDKPIREQAENIIH | |
| | LFTLTNLGAPAAFKYFDTTIDRKRYTSTKEVLDATLIHQSITGLYETRIDLSQLGGD | |
| Cas9 nickase | MDKKYSIGLDIGTNSVGWAVITDEYKVPSKKFKVLGNTDRHSIKKNLIGALLFDSGE | SEQ ID NO: |
| Streptococcus | TAEATRLKRTARRRYTRRKNRICYLQEIFSNEMAKVDDSFFHRLEESFLVEEDKKHE | 107 |
| pyogenes | RHPIFGNIVDEVAYHEKYPTIYHLRKKLVDSTDKADLRLIYLALAHMIKFRGHFLIE | |
| Q99ZW2 Cas9 | GDLNPDNSDVDKLFIQLVQTYNQLFEENPINASGVDAKAILSARLSKSRRLENLIAQ | |
| with H840A | LPGEKKNGLFGNLIALSLGLTPNFKSNFDLAEDAKLQLSKDTYDDDLDNLLAQIGDQ | |
| | YADLFLAAKNLSDAILLSDILRVNTEITKAPLSASMIKRYDEHHQDLTLLKALVRQQ | |
| | LPEKYKEIFFDQSKNGYAGYIDGGASQEEFYKFIKPILEKMDGTEELLVKLNREDLL | |
| | RKQRTFDNGSIPHQIHLGELHAILRRQEDFYPFLKDNREKIEKILTFRIPYYVGPLA | |
| | RGNSRFAWMTRKSEETITPWNFEEVVDKGASAQSFIERMTNFDKNLPNEKVLPKHSL | |
| | LYEYFTVYNELTKVKYVTEGMRKPAFLSGEQKKAIVDLLFKTNRKVTVKQLKEDYFK | |
| | KIECFDSVEISGVEDRFNASLGTYHDLLKIIKDKDFLDNEENEDILEDIVLTLTLFE | |
| | DREMIEERLKTYAHLFDDKVMKQLKRRRYTGWGRLSRKLINGIRDKQSGKTILDFLK | |
| | SDGFANRNFMQLIHDDSLTFKEDIQKAQVSGQGDSLHEHIANLAGSPAIKKGILQTV | |
| | KVVDELVKVMGRHKPENIVIEMARENQTTQKGQKNSRERMKRIEEGIKELGSQILKE | |
| | HPVENTQLQNEKLYLYYLQNGRDMYVDQELDINRLSDYDVDAIVPQSFLKDDSIDNK | |
| | VLTRSDKNRGKSDNVPSEEVVKKMKNYWRQLLNAKLITQRKFDNLTKAERGGLSELD | |
| | KAGFIKRQLVETRQITKHVAQILDSRMNTKYDENDKLIREVKVITLKSKLVSDFRKD | |
| | FQFYKVREINNYHHAHDAYLNAVVGTALIKKYPKLESEFVYGDYKVYDVRKMIAKSE | |
| | QEIGKATAKYFFYSNIMNFFKTEITLANGEIRKRPLIETNGETGEIVWDKGRDFATV | |
| | RKVLSMPQVNIVKKTEVQTGGFSKESILPKRNSDKLIARKKDWDPKKYGGFDSPTVA | |
| | YSVLVVAKVEKGKSKKLKSVKELLGITIMERSSFEKNPIDFLEAKGYKEVKKDLIIK | |
| | LPKYSLFELENGRKRMLASAGELQKGNELALPSKYVNFLYLASHYEKLKGSPEDNEQ | |
| | KQLFVEQHKHYLDEIIEQISEFSKRVILADANLDKVLSAYNKHRDKPIREQAENIIH | |
| | LFTLTNLGAPAAFKYFDTTIDRKRYTSTKEVLDATLIHQSITGLYETRIDLSQLGGD | |
| Cas9 nickase | MDKKYSIGLDIGTNSVGWAVITDEYKVPSKKFKVLGNTDRHSIKKNLIGALLFDSGE | SEQ ID NO: |
| Streptococcus | TAEATRLKRTARRRYTRRKNRICYLQEIFSNEMAKVDDSFFHRLEESFLVEEDKKHE | 108 |
| pyogenes | RHPIFGNIVDEVAYHEKYPTIYHLRKKLVDSTDKADLRLIYLALAHMIKFRGHFLIE | |
| Q99ZW2 Cas9 | GDLNPDNSDVDKLFIQLVQTYNQLFEENPINASGVDAKAILSARLSKSRRLENLIAQ | |
| with R863X, | LPGEKKNGLFGNLIALSLGLTPNFKSNFDLAEDAKLQLSKDTYDDDLDNLLAQIGDQ | |
| wherein X is | YADLFLAAKNLSDAILLSDILRVNTEITKAPLSASMIKRYDEHHQDLTLLKALVRQQ | |
| any | LPEKYKEIFFDQSKNGYAGYIDGGASQEEFYKFIKPILEKMDGTEELLVKLNREDLL | |
| alternate | RKQRTFDNGSIPHQIHLGELHAILRRQEDFYPFLKDNREKIEKILTFRIPYYVGPLA | |
| amino acid | RGNSRFAWMTRKSEETITPWNFEEVVDKGASAQSFIERMTNFDKNLPNEKVLPKHSL | |
| | LYEYFTVYNELTKVKYVTEGMRKPAFLSGEQKKAIVDLLFKTNRKVTVKQLKEDYFK | |
| | KIECFDSVEISGVEDRFNASLGTYHDLLKIIKDKDFLDNEENEDILEDIVLTLTLFE | |
| | DREMIEERLKTYAHLFDDKVMKQLKRRRYTGWGRLSRKLINGIRDKQSGKTILDFLK | |
| | SDGFANRNFMQLIHDDSLTFKEDIQKAQVSGQGDSLHEHIANLAGSPAIKKGILQTV | |
| | KVVDELVKVMGRHKPENIVIEMARENQTTQKGQKNSRERMKRIEEGIKELGSQILKE | |
| | HPVENTQLQNEKLYLYYLQNGRDMYVDQELDINRLSDYDVDHIVPQSFLKDDSIDNK | |
| | VLTRSDKNXGKSDNVPSEEWKKMKNYWRQLLNAKLITQRKFDNLTKAERGGLSELD | |
| | KAGFIKRQLVETRQITKHVAQILDSRMNTKYDENDKLIREVKVITLKSKLVSDFRKD | |
| | FQFYKVREINNYHHAHDAYLNAVVGTALIKKYPKLESEFVYGDYKVYDVRKMIAKSE | |
| | QEIGKATAKYFFYSNIMNFFKTEITLANGEIRKRPLIETNGETGEIVWDKGRDFATV | |
| | RKVLSMPQVNIVKKTEVQTGGFSKESILPKRNSDKLIARKKDWDPKKYGGFDSPTVA | |
| | YSVLVVAKVEKGKSKKLKSVKELLGITIMERSSFEKNPIDFLEAKGYKEVKKDLIIK | |
| | LPKYSLFELENGRKRMLASAGELQKGNELALPSKYVNFLYLASHYEKLKGSPEDNEQ | |
| | KQLFVEQHKHYLDEIIEQISEFSKRVILADANLDKVLSAYNKHRDKPIREQAENIIH | |
| | LFTLTNLGAPAAFKYFDTTIDRKRYTSTKEVLDATLIHQSITGLYETRIDLSQLGGD | |
| Cas9 nickase | MDKKYSIGLDIGTNSVGWAVITDEYKVPSKKFKVLGNTDRHSIKKNLIGALLFDSGE | SEQ ID NO: |
| Streptococcus | TAEATRLKRTARRRYTRRKNRICYLQEIFSNEMAKVDDSFFHRLEESFLVEEDKKHE | 109 |
| pyogenes | RHPIFGNIVDEVAYHEKYPTIYHLRKKLVDSTDKADLRLIYLALAHMIKFRGHFLIE | |
| Q99ZW2 Cas9 | GDLNPDNSDVDKLFIQLVQTYNQLFEENPINASGVDAKAILSARLSKSRRLENLIAQ | |
| with R863A | LPGEKKNGLFGNLIALSLGLTPNFKSNFDLAEDAKLQLSKDTYDDDLDNLLAQIGDQ | |
| | YADLFLAAKNLSDAILLSDILRVNTEITKAPLSASMIKRYDEHHQDLTLLKALVRQQ | |
| | LPEKYKEIFFDQSKNGYAGYIDGGASQEEFYKFIKPILEKMDGTEELLVKLNREDLL | |
| | RKQRTFDNGSIPHQIHLGELHAILRRQEDFYPFLKDNREKIEKILTFRIPYYVGPLA | |
| | RGNSRFAWMTRKSEETITPWNFEEVVDKGASAQSFIERMTNFDKNLPNEKVLPKHSL | |
| | LYEYFTVYNELTKVKYVTEGMRKPAFLSGEQKKAIVDLLFKTNRKVTVKQLKEDYFK | |
| | KIECFDSVEISGVEDRFNASLGTYHDLLKIIKDKDFLDNEENEDILEDIVLTLTLFE | |
| | DREMIEERLKTYAHLFDDKVMKQLKRRRYTGWGRLSRKLINGIRDKQSGKTILDFLK | |
| | SDGFANRNFMQLIHDDSLTFKEDIQKAQVSGQGDSLHEHIANLAGSPAIKKGILQTV | |
| | KVVDELVKVMGRHKPENIVIEMARENQTTQKGQKNSRERMKRIEEGIKELGSQILKE | |
| | HPVENTQLQNEKLYLYYLQNGRDMYVDQELDINRLSDYDVDHIVPQSFLKDDSIDNK | |
| | VLTRSDKNAGKSDNVPSEEVVKKMKNYWRQLLNAKLITQRKFDNLTKAERGGLSELD | |
| | KAGFIKRQLVETRQITKHVAQILDSRMNTKYDENDKLIREVKVITLKSKLVSDFRKD | |
| | FQFYKVREINNYHHAHDAYLNAVVGTALIKKYPKLESEFVYGDYKVYDVRKMIAKSE | |
| | QEIGKATAKYFFYSNIMNFFKTEITLANGEIRKRPLIETNGETGEIVWDKGRDFATV | |
| | RKVLSMPQVNIVKKTEVQTGGFSKESILPKRNSDKLIARKKDWDPKKYGGFDSPTVA | |
| | YSVLVVAKVEKGKSKKLKSVKELLGITIMERSSFEKNPIDFLEAKGYKEVKKDLIIK | |
| | LPKYSLFELENGRKRMLASAGELQKGNELALPSKYVNFLYLASHYEKLKGSPEDNEQ | |
| | KQLFVEQHKHYLDEIIEQISEFSKRVILADANLDKVLSAYNKHRDKPIREQAENIIH | |
| | LFTLTNLGAPAAFKYFDTTIDRKRYTSTKEVLDATLIHQSITGLYETRIDLSQLGGD | |

[0170] In some embodiments, the N-terminal methionine is removed from a Cas9 nickase, or from any Cas9 variant, ortholog, or equivalent disclosed or contemplated herein. For example, methionine-minus Cas9 nickases include the following sequences, or a variant thereof having an amino acid sequence that has at least 80%, at least 85%, at least 90%, at least 95%, or at least 99% sequence identity thereto.

| Description | Sequence |
|---|---|
| Cas9 nickase | DKKYSIGLDIGTNSVGWAVITDEYKVPSKKFKVLGNTDRHSIKKNLIGALLFDSGETAEATRLKRTARRR |
| (Met minus) | YTRRKNRICYLQEIFSNEMAKVDDSFFHRLEESFLVEEDKKHERHPIFGNIVDEVAYHEKYPTIYHLRKK |
| Streptococcus | LVDSTDKADLRLIYLALAHMIKFRGHFLIEGDLNPDNSDVDKLFIQLVQTYNQLFEENPINASGVDAKAI |
| pyogenes | LSARLSKSRRLENLIAQLPGEKKNGLFGNLIALSLGLTPNFKSNFDLAEDAKLQLSKDTYDDDLDNLLAQ |
| Q99ZW2 Cas9 | IGDQYADLFLAAKNLSDAILLSDILRVNTEITKAPLSASMIKRYDEHHQDLTLLKALVRQQLPEKYKEIF |
| with H840X, | FDQSKNGYAGYIDGGASQEEFYKFIKPILEKMDGTEELLVKLNREDLLRKQRTFDNGSIPHQIHLGELHA |
| wherein X is | ILRRQEDFYPFLKDNREKIEKILTFRIPYYVGPLARGNSRFAWMTRKSEETITPWNFEEVVDKGASAQSF |
| any | IERMTNFDKNLPNEKVLPKHSLLYEYFTVYNELTKVKYVTEGMRKPAFLSGEQKKAIVDLLFKTNRKVTV |
| alternate | KQLKEDYFKKIECFDSVEISGVEDRFNASLGTYHDLLKIIKDKDFLDNEENEDILEDIVLTLTLFEDREM |
| amino acid | IEERLKTYAHLFDDKVMKQLKRRRYTGWGRLSRKLINGIRDKQSGKTILDFLKSDGFANRNFMQLIHDDS |
| | LTFKEDIQKAQVSGQGDSLHEHIANLAGSPAIKKGILQTVKVVDELVKVMGRHKPENIVIEMARENQTTQ |
| | KGQKNSRERMKRIEEGIKELGSQILKEHPVENTQLQNEKLYLYYLQNGRDMYVDQELDINRLSDYDVDXI |
| | VPQSFLKDDSIDNKVLTRSDKNRGKSDNVPSEEVVKKMKNYWRQLLNAKLITQRKFDNLTKAERGGLSEL |
| | DKAGFIKRQLVETRQITKHVAQILDSRMNTKYDENDKLIREVKVITLKSKLVSDFRKDFQFYKVREINNY |
| | HHAHDAYLNAVVGTALIKKYPKLESEFVYGDYKVYDVRKMIAKSEQEIGKATAKYFFYSNIMNFFKTEIT |
| | LANGEIRKRPLIETNGETGEIVWDKGRDFATVRKVLSMPQVNIVKKTEVQTGGFSKESILPKRNSDKLIA |
| | RKKDWDPKKYGGFDSPTVAYSVLVVAKVEKGKSKKLKSVKELLGITIMERSSFEKNPIDFLEAKGYKEVK |
| | KDLIIKLPKYSLFELENGRKRMLASAGELQKGNELALPSKYVNFLYLASHYEKLKGSPEDNEQKQLFVEQ |
| | HKHYLDEIIEQISEFSKRVILADANLDKVLSAYNKHRDKPIREQAENIIHLFTLTNLGAPAAFKYFDTTI |
| | DRKRYTSTKEVLDATLIHQSITGLYETRIDLSQLGGD (SEQ ID NO: 110) |
| Cas9 nickase | DKKYSIGLDIGTNSVGWAVITDEYKVPSKKFKVLGNTDRHSIKKNLIGALLFDSGETAEATRLKRTARRR |
| Met minus) | YTRRKNRICYLQEIFSNEMAKVDDSFFHRLEESFLVEEDKKHERHPIFGNIVDEVAYHEKYPTIYHLRKK |
| Streptococcus | LVDSTDKADLRLIYLALAHMIKFRGHFLIEGDLNPDNSDVDKLFIQLVQTYNQLFEENPINASGVDAKAI |
| pyogenes | LSARLSKSRRLENLIAQLPGEKKNGLFGNLIALSLGLTPNFKSNFDLAEDAKLQLSKDTYDDDLDNLLAQ |
| Q99ZW2 Cas9 | IGDQYADLFLAAKNLSDAILLSDILRVNTEITKAPLSASMIKRYDEHHQDLTLLKALVRQQLPEKYKEIF |
| with H840A | FDQSKNGYAGYIDGGASQEEFYKFIKPILEKMDGTEELLVKLNREDLLRKQRTFDNGSIPHQIHLGELHA |
| | ILRRQEDFYPFLKDNREKIEKILTFRIPYYVGPLARGNSRFAWMTRKSEETITPWNFEEVVDKGASAQSF |
| | IERMTNFDKNLPNEKVLPKHSLLYEYFTVYNELTKVKYVTEGMRKPAFLSGEQKKAIVDLLFKTNRKVTV |
| | KQLKEDYFKKIECFDSVEISGVEDRFNASLGTYHDLLKIIKDKDFLDNEENEDILEDIVLTLTLFEDREM |
| | IEERLKTYAHLFDDKVMKQLKRRRYTGWGRLSRKLINGIRDKQSGKTILDFLKSDGFANRNFMQLIHDDS |
| | LTFKEDIQKAQVSGQGDSLHEHIANLAGSPAIKKGILQTVKVVDELVKVMGRHKPENIVIEMARENQTTQ |
| | KGQKNSRERMKRIEEGIKELGSQILKEHPVENTQLQNEKLYLYYLQNGRDMYVDQELDINRLSDYDVDAI |
| | VPQSFLKDDSIDNKVLTRSDKNRGKSDNVPSEEVVKKMKNYWRQLLNAKLITQRKFDNLTKAERGGLSEL |
| | DKAGFIKRQLVETRQITKHVAQILDSRMNTKYDENDKLIREVKVITLKSKLVSDFRKDFQFYKVREINNY |
| | HHAHDAYLNAVVGTALIKKYPKLESEFVYGDYKVYDVRKMIAKSEQEIGKATAKYFFYSNIMNFFKTEIT |
| | LANGEIRKRPLIETNGETGEIVWDKGRDFATVRKVLSMPQVNIVKKTEVQTGGFSKESILPKRNSDKLIA |
| | RKKDWDPKKYGGFDSPTVAYSVLVVAKVEKGKSKKLKSVKELLGITIMERSSFEKNPIDFLEAKGYKEVK |
| | KDLIIKLPKYSLFELENGRKRMLASAGELQKGNELALPSKYVNFLYLASHYEKLKGSPEDNEQKQLFVEQ |
| | HKHYLDEIIEQISEFSKRVILADANLDKVLSAYNKHRDKPIREQAENIIHLFTLTNLGAPAAFKYFDTTI |
| | DRKRYTSTKEVLDATLIHQSITGLYETRIDLSQLGGD (SEQ ID NO: 111) |
| Cas9 nickase | DKKYSIGLDIGTNSVGWAVITDEYKVPSKKFKVLGNTDRHSIKKNLIGALLFDSGETAEATRLKRTARRR |
| (Met minus) | YTRRKNRICYLQEIFSNEMAKVDDSFFHRLEESFLVEEDKKHERHPIFGNIVDEVAYHEKYPTIYHLRKK |
| Streptococcus | LVDSTDKADLRLIYLALAHMIKFRGHFLIEGDLNPDNSDVDKLFIQLVQTYNQLFEENPINASGVDAKAI |
| pyogenes | LSARLSKSRRLENLIAQLPGEKKNGLFGNLIALSLGLTPNFKSNFDLAEDAKLQLSKDTYDDDLDNLLAQ |
| Q99ZW2 Cas9 | IGDQYADLFLAAKNLSDAILLSDILRVNTEITKAPLSASMIKRYDEHHQDLTLLKALVRQQLPEKYKEIF |
| with R863X, | FDQSKNGYAGYIDGGASQEEFYKFIKPILEKMDGTEELLVKLNREDLLRKQRTFDNGSIPHQIHLGELHA |
| wherein X is | ILRRQEDFYPFLKDNREKIEKILTFRIPYYVGPLARGNSRFAWMTRKSEETITPWNFEEVVDKGASAQSF |
| any | IERMTNFDKNLPNEKVLPKHSLLYEYFTVYNELTKVKYVTEGMRKPAFLSGEQKKAIVDLLFKTNRKVTV |
| alternate | KQLKEDYFKKIECFDSVEISGVEDRFNASLGTYHDLLKIIKDKDFLDNEENEDILEDIVLTLTLFEDREM |
| amino acid | IEERLKTYAHLFDDKVMKQLKRRRYTGWGRLSRKLINGIRDKQSGKTILDFLKSDGFANRNFMQLIHDDS |
| | LTFKEDIQKAQVSGQGDSLHEHIANLAGSPAIKKGILQTVKVVDELVKVMGRHKPENIVIEMARENQTTQ |
| | KGQKNSRERMKRIEEGIKELGSQILKEHPVENTQLQNEKLYLYYLQNGRDMYVDQELDINRLSDYDVDHI |
| | VPQSFLKDDSIDNKVLTRSDKNXGKSDNVPSEEVVKKMKNYWRQLLNAKLITQRKFDNLTKAERGGLSEL |
| | DKAGFIKRQLVETRQITKHVAQILDSRMNTKYDENDKLIREVKVITLKSKLVSDFRKDFQFYKVREINNY |
| | HHAHDAYLNAVVGTALIKKYPKLESEFVYGDYKVYDVRKMIAKSEQEIGKATAKYFFYSNIMNFFKTEIT |
| | LANGEIRKRPLIETNGETGEIVWDKGRDFATVRKVLSMPQVNIVKKTEVQTGGFSKESILPKRNSDKLIA |
| | RKKDWDPKKYGGFDSPTVAYSVLVVAKVEKGKSKKLKSVKELLGITIMERSSFEKNPIDFLEAKGYKEVK |
| | KDLIIKLPKYSLFELENGRKRMLASAGELQKGNELALPSKYVNFLYLASHYEKLKGSPEDNEQKQLFVEQ |
| | HKHYLDEIIEQISEFSKRVILADANLDKVLSAYNKHRDKPIREQAENIIHLFTLTNLGAPAAFKYFDTTI |
| | DRKRYTSTKEVLDATLIHQSITGLYETRIDLSQLGGD(SEQ ID NO: 112) |
| Cas9 nickase | DKKYSIGLDIGTNSVGWAVITDEYKVPSKKFKVLGNTDRHSIKKNLIGALLFDSGETAEATRLKRTARRR |
| (Met minus) | YTRRKNRICYLQEIFSNEMAKVDDSFFHRLEESFLVEEDKKHERHPIFGNIVDEVAYHEKYPTIYHLRKK |
| Streptococcus | LVDSTDKADLRLIYLALAHMIKFRGHFLIEGDLNPDNSDVDKLFIQLVQTYNQLFEENPINASGVDAKAI |
| pyogenes | LSARLSKSRRLENLIAQLPGEKKNGLFGNLIALSLGLTPNFKSNFDLAEDAKLQLSKDTYDDDLDNLLAQ |
| Q99ZW2 Cas9 | IGDQYADLFLAAKNLSDAILLSDILRVNTEITKAPLSASMIKRYDEHHQDLTLLKALVRQQLPEKYKEIF |
| with R863A | FDQSKNGYAGYIDGGASQEEFYKFIKPILEKMDGTEELLVKLNREDLLRKQRTFDNGSIPHQIHLGELHA |
| | ILRRQEDFYPFLKDNREKIEKILTFRIPYYVGPLARGNSRFAWMTRKSEETITPWNFEEVVDKGASAQSF |
| | IERMTNFDKNLPNEKVLPKHSLLYEYFTVYNELTKVKYVTEGMRKPAFLSGEQKKAIVDLLFKTNRKVTV |
| | KQLKEDYFKKIECFDSVEISGVEDRFNASLGTYHDLLKIIKDKDFLDNEENEDILEDIVLTLTLFEDREM |
| | IEERLKTYAHLFDDKVMKQLKRRRYTGWGRLSRKLINGIRDKQSGKTILDFLKSDGFANRNFMQLIHDDS |
| | LTFKEDIQKAQVSGQGDSLHEHIANLAGSPAIKKGILQTVKVVDELVKVMGRHKPENIVIEMARENQTTQ |
| | KGQKNSRERMKRIEEGIKELGSQILKEHPVENTQLQNEKLYLYYLQNGRDMYVDQELDINRLSDYDVDHI |
| | VPQSFLKDDSIDNKVLTRSDKNAGKSDNVPSEEVVKKMKNYWRQLLNAKLITQRKFDNLTKAERGGLSEL |
| | DKAGFIKRQLVETRQITKHVAQILDSRMNTKYDENDKLIREVKVITLKSKLVSDFRKDFQFYKVREINNY |
| | HHAHDAYLNAVVGTALIKKYPKLESEFVYGDYKVYDVRKMIAKSEQEIGKATAKYFFYSNIMNFFKTEIT |
| | LANGEIRKRPLIETNGETGEIVWDKGRDFATVRKVLSMPQVNIVKKTEVQTGGFSKESILPKRNSDKLIA |
| | RKKDWDPKKYGGFDSPTVAYSVLVVAKVEKGKSKKLKSVKELLGITIMERSSFEKNPIDFLEAKGYKEVK |
| | KDLIIKLPKYSLFELENGRKRMLASAGELQKGNELALPSKYVNFLYLASHYEKLKGSPEDNEQKQLFVEQ |
| | HKHYLDEIIEQISEFSKRVILADANLDKVLSAYNKHRDKPIREQAENIIHLFTLTNLGAPAAFKYFDTTI |
| | DRKRYTSTKEVLDATLIHQSITGLYETRIDLSQLGGD (SEQ ID NO: 113) |

### (v) Other Cas9 Variants

[0171] Besides dead Cas9 and Cas9 nickase variants, the Cas9 proteins used herein may also include other “Cas9 variants” having at least about 70% identical, at least about 80% identical, at least about 90% identical, at least about 95% identical, at least about 96% identical, at least about 97% identical, at least about 98% identical, at least about 99% identical, at least about 99.5% identical, or at least about 99.9% identical to any reference Cas9 protein, including any wild type Cas9, or mutant Cas9 (e.g., a dead Cas9 or Cas9 nickase), or fragment Cas9, or circular permutant Cas9, or other variant of Cas9 disclosed herein or known in the art. In some embodiments, a Cas9 variant may have 1, 2, 3, 4, 5, 6, 7, 8, 9, 10, 11, 12, 13, 14, 15, 16, 17, 18, 19, 20, 21, 22, 21, 24, 25, 26, 27, 28, 29, 30, 31, 32, 33, 34, 35, 36, 37, 38, 39, 40, 41, 42, 43, 44, 45, 46, 47, 48, 49, 50 or more amino acid changes compared to a reference Cas9. In some embodiments, the Cas9 variant comprises a fragment of a reference Cas9 (e.g., a gRNA binding domain or a DNA-cleavage domain), such that the fragment is at least about 70% identical, at least about 80% identical, at least about 90% identical, at least about 95% identical, at least about 96% identical, at least about 97% identical, at least about 98% identical, at least about 99% identical, at least about 99.5% identical, or at least about 99.9% identical to the corresponding fragment of wild type Cas9. In some embodiments, the fragment is at least 30%, at least 35%, at least 40%, at least 45%, at least 50%, at least 55%, at least 60%, at least 65%, at least 70%, at least 75%, at least 80%, at least 85%, at least 90%, at least 95% identical, at least 96%, at least 97%, at least 98%, at least 99%, or at least 99.5% of the amino acid length of a corresponding wild type Cas9 (e.g., SEQ ID NO: 74). In exemplary embodiments, any of the base editors of the disclosure may comprise a dead Cas9 having at least 98% or at least 99% identity to the amino acid sequence set forth as SEQ ID NO: 101. In some embodiments, any of the disclosed base editors comprise a dead Cas9 having the sequence of SEQ ID NO: 101.

[0172] In some embodiments, the disclosure also may utilize Cas9 fragments which retain their functionality and which are fragments of any herein disclosed Cas9 protein. In some embodiments, the Cas9 fragment is at least 100 amino acids in length. In some embodiments, the fragment is at least 100, 150, 200, 250, 300, 350, 400, 450, 500, 550, 600, 650, 700, 750, 800, 850, 900, 950, 1000, 1050, 1100, 1150, 1200, 1250, or at least 1300 amino acids in length.

[0173] In various embodiments, the base editors disclosed herein may comprise one of the Cas9 variants described as follows, or a Cas9 variant thereof having at least about 70% identical, at least about 80% identical, at least about 90% identical, at least about 95% identical, at least about 96% identical, at least about 97% identical, at least about 98% identical, at least about 99% identical, at least about 99.5% identical, or at least about 99.9% identical to any reference Cas9 variants.

[0174] In various other embodiments, the napDNAbp can be any of the following proteins: a a Cpf1, a CasX, a CasY, a C2c1, a C2c2, a C2c3, a GeoCas9, a CjCas9, a Cas12a, a Cas12b, a Cas12g, a Cas12h, a Cas12i, a Cas13b, a Cas13c, a Cas13d, a Cas14, a Csn2, an xCas9, an SpCas9-NG, an SpCas9-NG-CP1041, an SpCas9-NG-VRQR, a circularly permuted Cas9, or an Argonaute (Ago) domain, a Cas9-KKH, an SPCas9-VQR, an SpCas9-VRQR, an SpCas9-NRRH, an SpaCas9-NRTH, an SpCas9-NRCH, or a variant thereof.

### (vi) Small-Sized Cas9 Variants

[0175] In some embodiments, the base editors contemplated herein can include a Cas9 protein that is of smaller molecular weight than the canonical SpCas9 sequence. In some embodiments, the smaller-sized Cas9 variants may facilitate delivery to cells, e.g., by an expression vector, nanoparticle, or other means of delivery.

[0176] The canonical SpCas9 protein is 1368 amino acids in length and has a predicted molecular weight of 158 kilodaltons. The term “small-sized Cas9 variant”, as used herein, refers to any Cas9 variant-naturally occurring, engineered, or otherwise-that is less than at least 1300 amino acids, or at least less than 1290 amino acids, or than less than 1280 amino acids, or less than 1270 amino acid, or less than 1260 amino acid, or less than 1250 amino acids, or less than 1240 amino acids, or less than 1230 amino acids, or less than 1220 amino acids, or less than 1210 amino acids, or less than 1200 amino acids, or less than 1190 amino acids, or less than 1180 amino acids, or less than 1170 amino acids, or less than 1160 amino acids, or less than 1150 amino acids, or less than 1140 amino acids, or less than 1130 amino acids, or less than 1120 amino acids, or less than 1110 amino acids, or less than 1100 amino acids, or less than 1050 amino acids, or less than 1000 amino acids, or less than 950 amino acids, or less than 900 amino acids, or less than 850 amino acids, or less than 800 amino acids, or less than 750 amino acids, or less than 700 amino acids, or less than 650 amino acids, or less than 600 amino acids, or less than 550 amino acids, or less than 500 amino acids, but at least larger than about 400 amino acids and retaining the required functions of the Cas9 protein.

[0177] In various embodiments, the base editors disclosed herein may comprise one of the small-sized Cas9 variants described as follows, or a Cas9 variant thereof having at least about 70% identical, at least about 80% identical, at least about 90% identical, at least about 95% identical, at least about 96% identical, at least about 97% identical, at least about 98% identical, at least about 99% identical, at least about 99.5% identical, or at least about 99.9% identical to any reference small-sized Cas9 protein.

| Description | Sequence | SEQ ID NO: |
|---|---|---|
| SaCas9 | MGKRNYILGLDIGITSVGYGIIDYETRDVIDAGVRLFKEANVENNEGRRSKRGARRL | SEQ ID NO: |
| Staphylococcus | KRRRRHRIQRVKKLLFDYNLLTDHSELSGINPYEARVKGLSQKLSEEEFSAALLHLA | 114 |
| aureus | KRRGVHNVNEVEEDTGNELSTKEQISRNSKALEEKYVAELQLERLKKDGEVRGSINR | |
| 1053 AA | FKTSDYVKEAKQLLKVQKAYHQLDQSFIDTYIDLLETRRTYYEGPGEGSPFGWKDIK | |
| 123 kDa | EWYEMLMGHCTYFPEELRSVKYAYNADLYNALNDLNNLVITRDENEKLEYYEKFQII | |
| | ENVFKQKKKPTLKQIAKEILVNEEDIKGYRVTSTGKPEFTNLKVYHDIKDITARKEI | |
| | IENAELLDQIAKILTIYQSSEDIQEELTNLNSELTQEEIEQISNLKGYTGTHNLSLK | |
| | AINLILDELWHTNDNQIAIFNRLKLVPKKVDLSQQKEIPTTLVDDFILSPVVKRSFI | |
| | QSIKVINAIIKKYGLPNDIIIELAREKNSKDAQKMINEMQKRNRQTNERIEEIIRTT | |
| | GKENAKYLIEKIKLHDMQEGKCLYSLEAIPLEDLLNNPFNYEVDHIIPRSVSFDNSF | |
| | NNKVLVKQEENSKKGNRTPFQYLSSSDSKISYETFKKHILNLAKGKGRISKTKKEYL | |
| | LEERDINRFSVQKDFINRNLVDTRYATRGLMNLLRSYFRVNNLDVKVKSINGGFTSF | |
| | LRRKWKFKKERNKGYKHHAEDALIIANADFIFKEWKKLDKAKKVMENQMFEEKQAES | |
| | MPEIETEQEYKEIFITPHQIKHIKDFKDYKYSHRVDKKPNRKLINDTLYSTRKDDKG | |
| | NTLIVNNLNGLYDKDNDKLKKLINKSPEKLLMYHHDPQTYQKLKLIMEQYGDEKNPL | |
| | YKYYEETGNYLTKYSKKDNGPVIKKIKYYGNKLNAHLDITDDYPNSRNKVVKLSLKP | |
| | YRFDVYLDNGVYKFVTVKNLDVIKKENYYEVNSKCYEEAKKLKKISNQAEFIASFYK | |
| | NDLIKINGELYRVIGVNNDLLNRIEVNMIDITYREYLENMNDKRPPHIIKTIASKTQ | |
| | SIKKYSTDILGNLYEVKSKKHPQIIKK | |
| NmeCas 9 | MAAFKPNSINYILGLDIGIASVGWAMVEIDEEENPIRLIDLGVRVFERAEVPKTGDS | SEQ ID NO: |
| N. | LAMARRLARSVRRLTRRRAHRLLRTRRLLKREGVLQAANFDENGLIKSLPNTPWQLR | 115 |
| meningitidis | AAALDRKLTPLEWSAVLLHLIKHRGYLSQRKNEGETADKELGALLKGVAGNAHALQT | |
| 1083 AA | GDFRTPAELALNKFEKESGHIRNQRSDYSHTFSRKDLQAELILLFEKQKEFGNPHVS | |
| 124.5 kDa | GGLKEGIETLLMTQRPALSGDAVQKMLGHCTFEPAEPKAAKNTYTAERFIWLTKLNN | |
| | LRILEQGSERPLTDTERATLMDEPYRKSKLTYAQARKLLGLEDTAFFKGLRYGKDNA | |
| | EASTLMEMKAYHAISRALEKEGLKDKKSPLNLSPELQDEIGTAFSLFKTDEDITGRL | |
| | KDRIQPEILEALLKHISFDKFVQISLKALRRIVPLMEQGKRYDEACAEIYGDHYGKK | |
| | NTEEKIYLPPIPADEIRNPVVLRALSQARKVINGVVRRYGSPARIHIETAREVGKSF | |
| | KDRKEIEKRQEENRKDREKAAAKFREYFPNFVGEPKSKDILKLRLYEQQHGKCLYSG | |
| | KEINLGRLNEKGYVEIDAALPFSRTWDDSFNNKVLVLGSENQNKGNQTPYEYFNGKD | |
| | NSREWQEFKARVETSRFPRSKKQRILLQKFDEDGFKERNLNDTRYVNRFLCQFVADR | |
| | MRLTGKGKKRVFASNGQITNLLRGFWGLRKVRAENDRHHALDAVVVACSTVAMQQKI | |
| | TRFVRYKEMNAFDGKTIDKETGEVLHQKTHFPQPWEFFAQEVMIRVFGKPDGKPEFE | |
| | EADTLEKLRTLLAEKLSSRPEAVHEYVTPLFVSRAPNRKMSGQGHMETVKSAKRLDE | |
| | GVSVLRVPLTQLKLKDLEKMVNREREPKLYEALKARLEAHKDDPAKAFAEPFYKYDK | |
| | AGNRTQQVKAVRVEQVQKTGVWVRNHNGIADNATMVRVDVFEKGDKYYLVPIYSWQV | |
| | AKGILPDRAVVQGKDEEDWQLIDDSFNFKFSLHPNDLVEVITKKARMFGYFASCHRG | |
| | TGNINIRIHDLDHKIGKNGILEGIGVKTALSFQKYQIDELGKEIRPCRLKKRPPVR | |
| CjCas9 | MARILAFDIGISSIGWAFSENDELKDCGVRIFTKVENPKTGESLALPRRLARSARKR | SEQ ID NO: |
| C. jejuni | LARRKARLNHLKHLIANEFKLNYEDYQSFDESLAKAYKGSLISPYELRFRALNELLS | 116 |
| 984 AA | KQDFARVILHIAKRRGYDDIKNSDDKEKGAILKAIKQNEEKLANYQSVGEYLYKEYF | |
| 114.9 kDa | QKFKENSKEFTNVRNKKESYERCIAQSFLKDELKLIFKKQREFGFSFSKKFEEEVLS | |
| | VAFYKRALKDFSHLVGNCSFFTDEKRAPKNSPLAFMFVALTRIINLLNNLKNTEGIL | |
| | YTKDDLNALLNEVLKNGTLTYKQTKKLLGLSDDYEFKGEKGTYFIEFKKYKEFIKAL | |
| | GEHNLSQDDLNEIAKDITLIKDEIKLKKALAKYDLNQNQIDSLSKLEFKDHLNISFK | |
| | ALKLVTPLMLEGKKYDEACNELNLKVAINEDKKDFLPAFNETYYKDEVTNPVVLRAI | |
| | KEYRKVLNALLKKYGKVHKINIELAREVGKNHSQRAKIEKEQNENYKAKKDAELECE | |
| | KLGLKINSKNILKLRLFKEQKEFCAYSGEKIKISDLQDEKMLEIDHIYPYSRSFDDS | |
| | YMNKVLVFTKQNQEKLNQTPFEAFGNDSAKWQKIEVLAKNLPTKKQKRILDKNYKDK | |
| | EQKNFKDRNLNDTRYIARLVLNYTKDYLDFLPLSDDENTKLNDTQKGSKVHVEAKSG | |
| | MLTSALRHTWGFSAKDRNNHLHHAIDAVIIAYANNSIVKAFSDFKKEQESNSAELYA | |
| | KKISELDYKNKRKFFEPFSGFRQKVLDKIDEIFVSKPERKKPSGALHEETFRKEEEF | |
| | YQSYGGKEGVLKALELGKIRKVNGKIVKNGDMFRVDIFKHKKTNKFYAVPIYTMDFA | |
| | LKVLPNKAVARSKKGEIKDWILMDENYEFCFSLYKDSLILIQTKDMQEPEFVYYNAF | |
| | TSSTVSLIVSKHDNKFETLSKNQKILFKNANEKEVIAKSIGIQNLKVFEKYIVSALG | |
| | EVTKAEFRQREDFKK | |
| GeoCas 9 | MRYKIGLDIGITSVGWAVMNLDIPRIEDLGVRIFDRAENPQTGESLALPRRLARSAR | SEQ ID NO: |
| G. | RRLRRRKHRLERIRRLVIREGILTKEELDKLFEEKHEIDVWQLRVEALDRKLNNDEL | 117 |
| stearothermo | ARVLLHLAKRRGFKSNRKSERSNKENSTMLKHIEENRAILSSYRTVGEMIVKDPKFA | |
| philus | LHKRNKGENYTNTIARDDLEREIRLIFSKQREFGNMSCTEEFENEYITIWASQRPVA | |
| 1087 AA | SKDDIEKKVGFCTFEPKEKRAPKATYTFQSFIAWEHINKLRLISPSGARGLTDEERR | |
| 127 kDa | LLYEQAFQKNKITYHDIRTLLHLPDDTYFKGIVYDRGESRKQNENIRFLELDAYHQI | |
| | RKAVDKVYGKGKSSSFLPIDFDTFGYALTLFKDDADIHSYLRNEYEQNGKRMPNLAN | |
| | KVYDNELIEELLNLSFTKFGHLSLKALRSILPYMEQGEVYSSACERAGYTFTGPKKK | |
| | QKTMLLPNIPPIANPVVMRALTQARKVVNAIIKKYGSPVSIHIELARDLSQTFDERR | |
| | KTKKEQDENRKKNETAIRQLMEYGLTLNPTGHDIVKFKLWSEQNGRCAYSLQPIEIE | |
| | RLLEPGYVEVDHVIPYSRSLDDSYTNKVLVLTRENREKGNRIPAEYLGVGTERWQQF | |
| | ETFVLTNKQFSKKKRDRLLRLHYDENEETEFKNRNLNDTRYISRFFANFIREHLKFA | |
| | ESDDKQKVYTVNGRVTAHLRSRWEFNKNREESDLHHAVDAVIVACTTPSDIAKVTAF | |
| | YQRREQNKELAKKTEPHFPQPWPHFADELRARLSKHPKESIKALNLGNYDDQKLESL | |
| | QPVFVSRMPKRSVTGAAHQETLRRYVGIDERSGKIQTVVKTKLSEIKLDASGHFPMY | |
| | GKESDPRTYEAIRQRLLEHNNDPKKAFQEPLYKPKKNGEPGPVIRTVKIIDTKNQVI | |
| | PLNDGKTVAYNSNIVRVDVFEKDGKYYCVPVYTMDIMKGILPNKAIEPNKPYSEWKE | |
| | MTEDYTFRFSLYPNDLIRIELPREKTVKTAAGEEINVKDVFVYYKTIDSANGGLELI | |
| | SHDHRFSLRGVGSRTLKRFEKYQVDVLGNIYKVRGEKRVGLASSAHSKPGKTIRPLQ | |
| | STRD | |
| LbaCas12a | MSKLEKFTNCYSLSKTLRFKAIPVGKTQENIDNKRLLVEDEKRAEDYKGVKKLLDRY | SEQ ID NO: |
| L. bacterium | YLSFINDVLHSIKLKNLNNYISLFRKKTRTEKENKELENLEINLRKEIAKAFKGNEG | 118 |
| 1228 AA | YKSLFKKDIIETILPEFLDDKDEIALVNSFNGFTTAFTGFFDNRENMFSEEAKSTSI | |
| 143.9 kDa | AFRCINENLTRYISNMDIFEKVDAIFDKHEVQEIKEKILNSDYDVEDFFEGEFFNFV | |
| | LTQEGIDVYNAIIGGFVTESGEKIKGLNEYINLYNQKTKQKLPKFKPLYKQVLSDRE | |
| | SLSFYGEGYTSDEEVLEVFRNTLNKNSEIFSSIKKLEKLFKNFDEYSSAGIFVKNGP | |
| | AISTISKDIFGEWNVIRDKWNAEYDDIHLKKKAVVTEKYEDDRRKSFKKIGSFSLEQ | |
| | LQEYADADLSVVEKLKEIIIQKVDEIYKVYGSSEKLFDADFVLEKSLKKNDAVVAIM | |
| | KDLLDSVKSFENYIKAFFGEGKETNRDESFYGDFVLAYDILLKVDHIYDAIRNYVTQ | |
| | KPYSKDKFKLYFQNPQFMGGWDKDKETDYRATILRYGSKYYLAIMDKKYAKCLQKID | |
| | KDDVNGNYEKINYKLLPGPNKMLPKVFFSKKWMAYYNPSEDIQKIYKNGTFKKGDMF | |
| | NLNDCHKLIDFFKDSISRYPKWSNAYDFNFSETEKYKDIAGFYREVEEQGYKVSFES | |
| | ASKKEVDKLVEEGKLYMFQIYNKDFSDKSHGTPNLHTMYFKLLFDENNHGQIRLSGG | |
| | AELFMRRASLKKEELVVHPANSPIANKNPDNPKKTTTLSYDVYKDKRFSEDQYELHI | |
| | PIAINKCPKNIFKINTEVRVLLKHDDNPYVIGIDRGERNLLYIVVVDGKGNIVEQYS | |
| | LNEIINNFNGIRIKTDYHSLLDKKEKERFEARQNWTSIENIKELKAGYISQVVHKIC | |
| | ELVEKYDAVIALEDLNSGFKNSRVKVEKQVYQKFEKMLIDKLNYMVDKKSNPCATGG | |
| | ALKGYQITNKFESFKSMSTQNGFIFYIPAWLTSKIDPSTGFVNLLKTKYTSIADSKK | |
| | FISSFDRIMYVPEEDLFEFALDYKNFSRTDADYIKKWKLYSYGNRIRIFRNPKKNNV | |
| | FDWEEVCLTSAYKELFNKYGINYQQGDIRALLCEQSDKAFYSSFMALMSLMLQMRNS | |
| | ITGRTDVDFLISPVKNSDGIFYDSRNYEAQENAILPKNADANGAYNIARKVLWAIGQ | |
| | FKKAEDEKLDKVKIAISNKEWLEYAQTSVKH | |
| BhCas12b | MATRSFILKIEPNEEVKKGLWKTHEVLNHGIAYYMNILKLIRQEAIYEHHEQDPKNP | SEQ ID NO: |
| B. hisashii | KKVSKAEIQAELWDFVLKMQKCNSFTHEVDKDEVFNILRELYEELVPSSVEKKGEAN | 119 |
| 1108 AA | QLSNKFLYPLVDPNSQSGKGTASSGRKPRWYNLKIAGDPSWEEEKKKWEEDKKKDPL | |
| 130.4 kDa | AKILGKLAEYGLIPLFIPYTDSNEPIVKEIKWMEKSRNQSVRRLDKDMFIQALERFL | |
| | SWESWNLKVKEEYEKVEKEYKTLEERIKEDIQALKALEQYEKERQEQLLRDTLNTNE | |
| | YRLSKRGLRGWREIIQKWLKMDENEPSEKYLEVFKDYQRKHPREAGDYSVYEFLSKK | |
| | ENHFIWRNHPEYPYLYATFCEIDKKKKDAKQQATFTLADPINHPLWVRFEERSGSNL | |
| | NKYRILTEQLHTEKLKKKLTVQLDRLIYPTESGGWEEKGKVDIVLLPSRQFYNQIFL | |
| | DIEEKGKHAFTYKDESIKFPLKGTLGGARVQFDRDHLRRYPHKVESGNVGRIYFNMT | |
| | VNIEPTESPVSKSLKIHRDDFPKVVNFKPKELTEWIKDSKGKKLKSGIESLEIGLRV | |
| | MSIDLGQRQAAAASIFEVVDQKPDIEGKLFFPIKGTELYAVHRASFNIKLPGETLVK | |
| | SREVLRKAREDNLKLMNQKLNFLRNVLHFQQFEDITEREKRVTKWISRQENSDVPLV | |
| | YQDELIQIRELMYKPYKDWVAFLKQLHKRLEVEIGKEVKHWRKSLSDGRKGLYGISL | |
| | KNIDEIDRTRKFLLRWSLRPTEPGEVRRLEPGQRFAIDQLNHLNALKEDRLKKMANT | |
| | IIMHALGYCYDVRKKKWQAKNPACQIILFEDLSNYNPYEERSRFENSKLMKWSRREI | |
| | PRQVALQGEIYGLQVGEVGAQFSSRFHAKTGSPGIRCSVVTKEKLQDNRFFKNLQRE | |
| | GRLTLDKIAVLKEGDLYPDKGGEKFISLSKDRKCVTTHADINAAQNLQKRFWTRTHG | |
| | FYKVYCKAYQVDGQTVYIPESKDQKQKIIEEFGEGYFILKDGVYEWVNAGKLKIKKG | |
| | SSKQSSSELVDSDILKDSFDLASELKGEKLMLYRDPSGNVFPSDKWMAAGVFFGKLE | |
| | RILISKLTNQYSISTIEDDSSKQSM | |

(vii) Other Cas9 Equivalents

[0178] In some embodiments, the base editors described herein can include any Cas9 equivalent. As used herein, the term “Cas9 equivalent” is a broad term that encompasses any napDNAbp protein that serves the same function as Cas9 in the present base editors despite that its amino acid primary sequence and/or its three-dimensional structure may be different and/or unrelated from an evolutionary standpoint. Thus, while Cas9 equivalents include any Cas9 ortholog, homolog, mutant, or variant described or embraced herein that are evolutionarily related, the Cas9 equivalents also embrace proteins that may have evolved through convergent evolution processes to have the same or similar function as Cas9, but which do not necessarily have any similarity with regard to amino acid sequence and/or three dimensional structure. The base editors described here embrace any Cas9 equivalent that would provide the same or similar function as Cas9 despite that the Cas9 equivalent may be based on a protein that arose through convergent evolution.

[0179] For example, CasX is a Cas9 equivalent that reportedly has the same function as Cas9 but which evolved through convergent evolution. Thus, the CasX protein described in Liu et al., “CasX enzymes comprises a distinct family of RNA-guided genome editors,” Nature, 2019, Vol.566: 218-223, is contemplated to be used with the base editors described herein. In addition, any variant or modification of CasX is conceivable and within the scope of the present disclosure.

[0180] Cas9 is a bacterial enzyme that evolved in a wide variety of species. However, the Cas9 equivalents contemplated herein may also be obtained from archaea, which constitute a domain and kingdom of single-celled prokaryotic microbes different from bacteria.

[0181] In some embodiments, Cas9 equivalents may refer to CasX or CasY, which have been described in, for example, Burstein et al., “New CRISPR-Cas systems from uncultivated microbes.” Cell Res. 2017 Feb. 21. doi: 10.1038/cr.2017.21, the entire contents of which is hereby incorporated by reference. Using genome-resolved metagenomics, a number of CRISPR-Cas systems were identified, including the first reported Cas9 in the archaeal domain of life. This divergent Cas9 protein was found in little-studied nanoarchaea as part of an active CRISPR-Cas system. In bacteria, two previously unknown systems were discovered, CRISPR-CasX and CRISPR-CasY, which are among the most compact systems yet discovered. In some embodiments, Cas9 refers to CasX, or a variant of CasX. In some embodiments, Cas9 refers to a CasY, or a variant of CasY. It should be appreciated that other RNA-guided DNA binding proteins may be used as a nucleic acid programmable DNA binding protein (napDNAbp), and are within the scope of this disclosure. Also see Liu et al., “CasX enzymes comprises a distinct family of RNA-guided genome editors,” Nature, 2019, Vol.566: 218-223. Any of these Cas9 equivalents are contemplated.

[0182] In some embodiments, the Cas9 equivalent comprises an amino acid sequence that is at least 85%, at least 90%, at least 91%, at least 92%, at least 93%, at least 94%, at least 95%, at least 96%, at least 97%, at least 98%, at least 99%, or at least 99.5% identical to a naturally-occurring CasX or CasY protein. In some embodiments, the napDNAbp is a naturally-occurring CasX or CasY protein. In some embodiments, the napDNAbp comprises an amino acid sequence that is at least 85%, at least 90%, at least 91%, at least 92%, at least 93%, at least 94%, at least 95%, at least 96%, at least 97%, at least 98%, at least 99%, or at least 99.5% identical to a wild-type Cas moiety or any Cas moiety provided herein.

[0183] In various embodiments, the nucleic acid programmable DNA binding proteins include, without limitation, Cas9 (e.g., dCas9 and nCas9), CasX, CasY, Cpf1, C2c1, C2c2, C2C3, Argonaute, Cas12a, and Cas12b. Examples of Cas12b napDNAbp domains include Bacillus hisashii Cas12b (BhCas12b), Alicyclobacillus acidiphilus Cas12b (AaCas12b), and Bacillus sp. V3-13 (BvCas12b). One example of a nucleic acid programmable DNA-binding protein that has different PAM specificity than Cas9 is Clustered Regularly Interspaced Short Palindromic Repeats from Prevotella and Francisella 1 (Cpf1). Similar to Cas9, Cpf1 is also a class 2 CRISPR effector. It has been shown that Cpf1 mediates robust DNA interference with features distinct from Cas9. Cpf1 is a single RNA-guided endonuclease lacking tracrRNA, and it utilizes a T-rich protospacer-adjacent motif (TTN, TTTN, or YTN). Moreover, Cpf1 cleaves DNA via a staggered DNA double-stranded break. Out of 16 Cpf1-family proteins, two enzymes from Acidaminococcus and Lachnospiraceae are shown to have efficient genome-editing activity in human cells. Cpf1 proteins are known in the art and have been described previously, for example Yamano et al., “Crystal structure of Cpf1 in complex with guide RNA and target DNA.” Cell (165) 2016, p. 949-962; the entire contents of which is hereby incorporated by reference. The state of the art may also now refer to Cpf1 enzymes as Cas12a.

[0184] In still other embodiments, the Cas protein may include any CRISPR associated protein, including but not limited to, Cas12a, Cas12b, Casl, Cas1B, Cas2, Cas3, Cas4, Cas5, Cas6, Cas7, Cas8, Cas9 (also known as Csn1 and Csx12), Cas10, Csy1, Csy2, Csy3, Cse1, Cse2, Csc1, Csc2, Csa5, Csn2. Csm2, Csm3, Csm4, Csm5, Csm6, Cmrl, Cmr3, Cmr4, Cmr5, Cmr6, Csb1, Csb2, Csb3, Csx17, Csx14, Csx10, Csx16, CsaX, Csx3, Csx1, Csx15, Csfl, Csf2, Csf3, Csf4, homologs thereof, or modified versions thereof, and preferably comprising a nickase mutation (e.g., a mutation corresponding to the D10A mutation of the wild type Cas9 polypeptide of SEQ ID NO:74).

[0185] In various other embodiments, the napDNAbp can be any of the following proteins: a Cas9, a Cpf1, a CasX, a CasY, a C2c1, a C2c2, a C2c3, a GeoCas9, a CjCas9, a Cas12a, a Cas12b, a Cas12g, a Cas12h, a Cas12i, a Cas13b, a Cas13c, a Cas13d, a Cas14, a Csn2, an xCas9, an SpCas9-NG, a circularly permuted Cas9 domain such as CP1012, CP1028, CP1041, CP1249, and CP1300, or an Argonaute (Ago) domain, a Cas9-KKH, a SmacCas9, a Spy-macCas9, an SpCas9-VRQR, an SpCas9-NG-VRQR, an SpCas9-VRER, an SpCas9-VQR, an SpCas9-NG-VQR, an SpCas9-EQR, an SpCas9-NRRH, an SpaCas9-NRTH, an SpCas9-NRCH, an LbCas12a, an AsCas12a, a CeCas12a, an MbCas12a, Cas(I), or a variant thereof.

[0186] Exemplary Cas9 equivalent protein sequences can include the following:

| Description | Sequence |
|---|---|
| AsCas12a | MTQFEGFTNLYQVSKTLRFELIPQGKTLKHIQEQGFIEEDKARNDHYKELKPIIDRIYKTYADQCLQLVQL |
| (previously | DWENLSAAIDSYRKEKTEETRNALIEEQATYRNAIHDYFIGRTDNLTDAINKRHAEIYKGLFKAELFNGKV |
| known as | LKQLGTVTTTEHENALLRSFDKFTTYFSGFYENRKNVFSAEDISTAIPHRIVQDNFPKFKENCHIFTRLIT |
| Cpf1) | AVPSLREHFENVKKAIGIFVSTSIEEVFSFPFYNQLLTQTQIDLYNQLLGGISREAGTEKIKGLNEVLNLA |
| Acidaminocoecus | IQKNDETAHIIASLPHRFIPLFKQILSDRNTLSFILEEFKSDEEVIQSFCKYKTLLRNENVLETAEALFNE |
| sp. | LNSIDLTHIFISHKKLETISSALCDHWDTLRNALYERRISELTGKITKSAKEKVRQRSLKHEDINLQEIIS |
| (strain | AAGKELSEAFKQKTSEILSHAHAALDQPLPTTLKKQEEKEILKSQLDSLLGLYHLLDWFAVDESNEVDPEF |
| BV3L6) | SARLTGIKLEMEPSLSFYNKARNYATKKPYSVEKFKLNFQMPTLASGWDVNKEKNNGAILFVKNGLYYLGI |
| UniProtKB | MPKQKGRYKALSFEPTEKTSEGFDKMYYDYFPDAAKMIPKCSTQLKAVTAHFQTHTTPILLSNNFIEPLEI |
| U2UMQ6 | TKEIYDLNNPEKEPKKFQTAYAKKTGDQKGYREALCKWIDFTRDFLSKYTKTTSIDLSSLRPSSQYKDLGE |
| | YYAELNPLLYHISFQRIAEKEIMDAVETGKLYLFQIYNKDFAKGHHGKPNLHTLYWTGLFSPENLAKTSIK |
| | LNGQAELFYRPKSRMKRMAHRLGEKMLNKKLKDQKTPIPDTLYQELYDYVNHRLSHDLSDEARALLPNVIT |
| | KEVSHEIIKDRRFTSDKFFFHVPITLNYQAANSPSKFNQRVNAYLKEHPETPIIGIDRGERNLIYITVIDS |
| | TGKILEQRSLNTIQQFDYQKKLDNREKERVAARQAWSVVGTIKDLKQGYLSQVIHEIVDLMIHYQAVVVLE |
| | NLNFGFKSKRTGIAEKAVYQQFEKMLIDKLNCLVLKDYPAEKVGGVLNPYQLTDQFTSFAKMGTQSGFLFY |
| | VPAPYTSKIDPLTGFVDPFVWKTIKNHESRKHFLEGFDFLHYDVKTGDFILHFKMNRNLSFQRGLPGFMPA |
| | WDIVFEKNETQFDAKGTPFIAGKRIVPVIENHRFTGRYRDLYPANELIALLEEKGIVFRDGSNILPKLLEN |
| | DDSHAIDTMVALIRSVLQMRNSNAATGEDYINSPVRDLNGVCFDSRFQNPEWPMDADANGAYHIALKGQLL |
| | LNHLKESKDLKLQNGISNQDWLAYIQELRN (SEQ ID NO: 120) |
| AsCas12a | MTQFEGFTNLYQVSKTLRFELIPQGKTLKHIQEQGFIEEDKARNDHYKELKPIIDRIYKTYADQCLQLVQL |
| nickase | DWENLSAAIDSYRKEKTEETRNALIEEQATYRNAIHDYFIGRTDNLTDAINKRHAEIYKGLFKAELFNGKV |
| (e.g., | LKQLGTVTTTEHENALLRSFDKFTTYFSGFYENRKNVFSAEDISTAIPHRIVQDNFPKFKENCHIFTRLIT |
| R1226A) | AVPSLREHFENVKKAIGIFVSTSIEEVFSFPFYNQLLTQTQIDLYNQLLGGISREAGTEKIKGLNEVLNLA |
| | IQKNDETAHIIASLPHRFIPLFKQILSDRNTLSFILEEFKSDEEVIQSFCKYKTLLRNENVLETAEALFNE |
| | LNSIDLTHIFISHKKLETISSALCDHWDTLRNALYERRISELTGKITKSAKEKVRQRSLKHEDINLQEIIS |
| | AAGKELSEAFKQKTSEILSHAHAALDQPLPTTLKKQEEKEILKSQLDSLLGLYHLLDWFAVDESNEVDPEF |
| | SARLTGIKLEMEPSLSFYNKARNYATKKPYSVEKFKLNFQMPTLASGWDVNKEKNNGAILFVKNGLYYLGI |
| | MPKQKGRYKALSFEPTEKTSEGFDKMYYDYFPDAAKMIPKCSTQLKAVTAHFQTHTTPILLSNNFIEPLEI |
| | TKEIYDLNNPEKEPKKFQTAYAKKTGDQKGYREALCKWIDFTRDFLSKYTKTTSIDLSSLRPSSQYKDLGE |
| | YYAELNPLLYHISFQRIAEKEIMDAVETGKLYLFQIYNKDFAKGHHGKPNLHTLYWTGLFSPENLAKTSIK |
| | LNGQAELFYRPKSRMKRMAHRLGEKMLNKKLKDQKTPIPDTLYQELYDYVNHRLSHDLSDEARALLPNVIT |
| | KEVSHEIIKDRRFTSDKFFFHVPITLNYQAANSPSKFNQRVNAYLKEHPETPIIGIDRGERNLIYITVIDS |
| | TGKILEQRSLNTIQQFDYQKKLDNREKERVAARQAWSVVGTIKDLKQGYLSQVIHEIVDLMIHYQAVVVLE |
| | NLNFGFKSKRTGIAEKAVYQQFEKMLIDKLNCLVLKDYPAEKVGGVLNPYQLTDQFTSFAKMGTQSGFLFY |
| | VPAPYTSKIDPLTGFVDPFVWKTIKNHESRKHFLEGFDFLHYDVKTGDFILHFKMNRNLSFQRGLPGFMPA |
| | WDIVFEKNETQFDAKGTPFIAGKRIVPVIENHRFTGRYRDLYPANELIALLEEKGIVFRDGSNILPKLLEN |
| | DDSHAIDTMVALIRSVLQMANSNAATGEDYINSPVRDLNGVCFDSRFQNPEWPMDADANGAYHIALKGQLL |
| | LNHLKESKDLKLQNGISNQDWLAYIQELRN (SEQ ID NO: 121) |
| LbCas12a | MNYKTGLEDFIGKESLSKTLRNALIPTESTKIHMEEMGVIRDDELRAEKQQELKEIMDDYYRTFIEEKLGQ |
| (previously | IQGIQWNSLFQKMEETMEDISVRKDLDKIQNEKRKEICCYFTSDKRFKDLFNAKLITDILPNFIKDNKEYT |
| known as | EEEKAEKEQTRVLFQRFATAFTNYFNQRRNNFSEDNISTAISFRIVNENSEIHLQNMRAFQRIEQQYPEEV |
| Cpf1) | CGMEEEYKDMLQEWQMKHIYSVDFYDRELTQPGIEYYNGICGKINEHMNQFCQKNRINKNDFRMKKLHKQI |
| Lachnospiraceae | LCKKSSYYEIPFRFESDQEVYDALNEFIKTMKKKEIIRRCVHLGQECDDYDLGKIYISSNKYEQISNALYG |
| bacterium | SWDTIRKCIKEEYMDALPGKGEKKEEKAEAAAKKEEYRSIADIDKIISLYGSEMDRTISAKKCITEICDMA |
| GAM 7 9 | GQISIDPLVCNSDIKLLQNKEKTTEIKTILDSFLHVYQWGQTFIVSDIIEKDSYFYSELEDVLEDFEGITT |
| Ref Seq. | LYNHVRSYVTQKPYSTVKFKLHFGSPTLANGWSQSKEYDNNAILLMRDQKFYLGIFNVRNKPDKQIIKGHE |
| WP_11962338 | KEEKGDYKKMIYNLLPGPSKMLPKVFITSRSGQETYKPSKHILDGYNEKRHIKSSPKFDLGYCWDLIDYYK |
| 2.1 | ECIHKHPDWKNYDFHFSDTKDYEDISGFYREVEMQGYQIKWTYISADEIQKLDEKGQIFLFQIYNKDFSVH |
| | STGKDNLHTMYLKNLFSEENLKDIVLKLNGEAELFFRKASIKTPIVHKKGSVLVNRSYTQTVGNKEIRVSI |
| | PEEYYTEIYNYLNHIGKGKLSSEAQRYLDEGKIKSFTATKDIVKNYRYCCDHYFLHLPITINFKAKSDVAV |
| | NERTLAYIAKKEDIHIIGIDRGERNLLYISVVDVHGNIREQRSFNIVNGYDYQQKLKDREKSRDAARKNWE |
| | EIEKIKELKEGYLSMVIHYIAQLVVKYNAVVAMEDLNYGFKTGRFKVERQVYQKFETMLIEKLHYLVFKDR |
| | EVCEEGGVLRGYQLTYIPESLKKVGKQCGFIFYVPAGYTSKIDPTTGFVNLFSFKNLTNRESRQDFVGKFD |
| | EIRYDRDKKMFEFSFDYNNYIKKGTILASTKWKVYTNGTRLKRIVVNGKYTSQSMEVELTDAMEKMLQRAG |
| | IEYHDGKDLKGQIVEKGIEAEIIDIFRLTVQMRNSRSESEDREYDRLISPVLNDKGEFFDTATADKTLPQD |
| | ADANGAYCIALKGLYEVKQIKENWKENEQFPRNKLVQDNKTWFDFMQKKRYL (SEQ ID NO: 122) |
| PcCas12a- | MAKNFEDFKRLYSLSKTLRFEAKPIGATLDNIVKSGLLDEDEHRAASYVKVKKLIDEYHKVFIDRVLDDGC |
| previously | LPLENKGNNNSLAEYYESYVSRAQDEDAKKKFKEIQQNLRSVIAKKLTEDKAYANLFGNKLIESYKDKEDK |
| known at | KKIIDSDLIQFINTAESTQLDSMSQDEAKELVKEFWGFVTYFYGFFDNRKNMYTAEEKSTGIAYRLVNENL |
| Cpf1 | PKFIDNIEAFNRAITRPEIQENMGVLYSDFSEYLNVESIQEMFQLDYYNMLLTQKQIDVYNAIIGGKIDDE |
| Prevotella | HDVKIKGINEYINLYNQQHKDDKLPKLKALFKQILSDRNAISWLPEEFNSDQEVLNAIKDCYERLAENVLG |
| copri | DKVLKSLLGSLADYSLDGIFIRNDLQLTDISQKMFGNWGVIQNAIMQNIKRVAPARKHKESEEDYEKRIAG |
| Ref Seq. | IFKKADSFSISYINDCLNEADPNNAYFVENYFATFGAVNTPTMQRENLFALVQNAYTEVAALLHSDYPTVK |
| WP_11922772 | HLAQDKANVSKIKALLDAIKSLQHFVKPLLGKGDESDKDERFYGELASLWAELDTVTPLYNMIRNYMTRKP |
| 6.1 | YSQKKIKLNFENPQLLGGWDANKEKDYATIILRRNGLYYLAIMDKDSRKLLGKAMPSDGECYEKMVYKFFK |
| | DVTTMIPKCSTQLKDVQAYFKVNTDDYVLNSKAFNKPLTITKEVFDLNNVLYGKYKKFQKGYLTATGDNVG |
| | YTHAVNVWIKFCMDFLNSYDSTCIYDFSSLKPESYLSLDAFYQDANLLLYKLSFARASVSYINQLVEEGKM |
| | YLFQIYNKDFSEYSKGTPNMHTLYWKALFDERNLADVVYKLNGQAEMFYRKKSIENTHPTHPANHPILNKN |
| | KDNKKKESLFDYDLIKDRRYTVDKFMFHVPITMNFKSVGSENINQDVKAYLRHADDMHIIGIDRGERHLLY |
| | LVVIDLQGNIKEQYSLNEIVNEYNGNTYHTNYHDLLDVREEERLKARQSWQTIENIKELKEGYLSQVIHKI |
| | TQLMVRYHAIVVLEDLSKGFMRSRQKVEKQVYQKFEKMLIDKLNYLVDKKTDVSTPGGLLNAYQLTCKSDS |
| | SQKLGKQSGFLFYIPAWNTSKIDPVTGFVNLLDTHSLNSKEKIKAFFSKFDAIRYNKDKKWFEFNLDYDKF |
| | GKKAEDTRTKWTLCTRGMRIDTFRNKEKNSQWDNQEVDLTTEMKSLLEHYYIDIHGNLKDAISAQTDKAFF |
| | TGLLHILKLTLQMRNSITGTETDYLVSPVADENGIFYDSRSCGNQLPENADANGAYNIARKGLMLIEQIKN |
| | AEDLNNVKFDISNKAWLNFAQQKPYKNG (SEQ ID NO: 123) |
| ErCas12a- | MFSAKLISDILPEFVIHNNNYSASEKEEKTQVIKLFSRFATSFKDYFKNRANCFSANDISSSSCHRIVNDN |
| previously | AEIFFSNALVYRRIVKNLSNDDINKISGDMKDSLKEMSLEEIYSYEKYGEFITQEGISFYNDICGKVNLFM |
| known at | NLYCQKNKENKNLYKLRKLHKQILCIADTSYEVPYKFESDEEVYQSVNGFLDNISSKHIVERLRKIGENYN |
| Cpf1 | GYNLDKIYIVSKFYESVSQKTYRDWETINTALEIHYNNILPGNGKSKADKVKKAVKNDLQKSITEINELVS |
| Eubacterium | NYKLCPDDNIKAETYIHEISHILNNFEAQELKYNPEIHLVESELKASELKNVLDVIMNAFHWCSVFMTEEL |
| rectale | VDKDNNFYAELEEIYDEIYPVISLYNLVRNYVTQKPYSTKKIKLNFGIPTLADGWSKSKEYSNNAIILMRD |
| Ref Seq. | NLYYLGIFNAKNKPDKKIIEGNTSENKGDYKKMIYNLLPGPNKMIPKVFLSSKTGVETYKPSAYILEGYKQ |
| WP_11922364 | NKHLKSSKDFDITFCHDLIDYFKNCIAIHPEWKNFGFDFSDTSTYEDISGFYREVELQGYKIDWTYISEKD |
| 2.1 | IDLLQEKGQLYLFQIYNKDFSKKSSGNDNLHTMYLKNLFSEENLKDIVLKLNGEAEIFFRKSSIKNPIIHK |
| | KGSILVNRTYEAEEKDQFGNIQIVRKTIPENIYQELYKYFNDKSDKELSDEAAKLKNVVGHHEAATNIVKD |
| | YRYTYDKYFLHMPITINFKANKTSFINDRILQYIAKEKDLHVIGIDRGERNLIYVSVIDTCGNIVEQKSFN |
| | IVNGYDYQIKLKQQEGARQIARKEWKEIGKIKEIKEGYLSLVIHEISKMVIKYNAIIAMEDLSYGFKKGRF |
| | KVERQVYQKFETMLINKLNYLVFKDISITENGGLLKGYQLTYIPDKLKNVGHQCGCIFYVPAAYTSKIDPT |
| | TGFVNIFKFKDLTVDAKREFIKKFDSIRYDSDKNLFCFTFDYNNFITQNTVMSKSSWSVYTYGVRIKRRFV |
| | NGRFSNESDTIDITKDMEKTLEMTDINWRDGHDLRQDIIDYEIVQHIFEIFKLTVQMRNSLSELEDRDYDR |
| | LISPVLNENNIFYDSAKAGDALPKDADANGAYCIALKGLYEIKQITENWKEDGKFSRDKLKISNKDWFDFI |
| | QNKRYL (SEQ ID NO: 124) |
| CsCas12a- | MNYKTGLEDFIGKESLSKTLRNALIPTESTKIHMEEMGVIRDDELRAEKQQELKEIMDDYYRAFIEEKLGQ |
| previously | IQGIQWNSLFQKMEETMEDISVRKDLDKIQNEKRKEICCYFTSDKRFKDLFNAKLITDILPNFIKDNKEYT |
| known at | EEEKAEKEQTRVLFQRFATAFTNYFNQRRNNFSEDNISTAISFRIVNENSEIHLQNMRAFQRIEQQYPEEV |
| Cpf1 | CGMEEEYKDMLQEWQMKHIYLVDFYDRVLTQPGIEYYNGICGKINEHMNQFCQKNRINKNDFRMKKLHKQI |
| Clostridium | LCKKSSYYEIPFRFESDQEVYDALNEFIKTMKEKEIICRCVHLGQKCDDYDLGKIYISSNKYEQISNALYG |
| sp. AF34- | SWDTIRKCIKEEYMDALPGKGEKKEEKAEAAAKKEEYRSIADIDKIISLYGSEMDRTISAKKCITEICDMA |
| 10BH | GQISTDPLVCNSDIKLLQNKEKTTEIKTILDSFLHVYQWGQTFIVSDIIEKDSYFYSELEDVLEDFEGITT |
| Ref Seq. | LYNHVRSYVTQKPYSTVKFKLHFGSPTLANGWSQSKEYDNNAILLMRDQKFYLGIFNVRNKPDKQIIKGHE |
| WP_11853841 | KEEKGDYKKMIYNLLPGPSKMLPKVFITSRSGQETYKPSKHILDGYNEKRHIKSSPKFDLGYCWDLIDYYK |
| 8.1 | ECIHKHPDWKNYDFHFSDTKDYEDISGFYREVEMQGYQIKWTYISADEIQKLDEKGQIFLFQIYNKDFSVH |
| | STGKDNLHTMYLKNLFSEENLKDIVLKLNGEAELFFRKASIKTPVVHKKGSVLVNRSYTQTVGDKEIRVSI |
| | PEEYYTEIYNYLNHIGRGKLSTEAQRYLEERKIKSFTATKDIVKNYRYCCDHYFLHLPITINFKAKSDIAV |
| | NERTLAYIAKKEDIHIIGIDRGERNLLYISVVDVHGNIREQRSFNIVNGYDYQQKLKDREKSRDAARKNWE |
| | EIEKIKELKEGYLSMVIHYIAQLVVKYNAVVAMEDLNYGFKTGRFKVERQVYQKFETMLIEKLHYLVFKDR |
| | EVCEEGGVLRGYQLTYIPESLKKVGKQCGFIFYVPAGYTSKIDPTTGFVNLFSFKNLTNRESRQDFVGKFD |
| | EIRYDRDKKMFEFSFDYNNYIKKGTMLASTKWKVYTNGTRLKRIVVNGKYTSQSMEVELTDAMEKMLQRAG |
| | IEYHDGKDLKGQIVEKGIEAEIIDIFRLTVQMRNSRSESEDREYDRLISPVLNDKGEFFDTATADKTLPQD |
| | ADANGAYCIALKGLYEVKQIKENWKENEQFPRNKLVQDNKTWFDFMQKKRYL (SEQ ID NO: 125) |
| BhCas12b | MATRSFILKIEPNEEVKKGLWKTHEVLNHGIAYYMNILKLIRQEAIYEHHEQDPKNPKKVSKAEIQAELWD |
| Bacillus | FVLKMQKCNSFTHEVDKDEVFNILRELYEELVPSSVEKKGEANQLSNKFLYPLVDPNSQSGKGTASSGRKP |
| hisashii | RWYNLKIAGDPSWEEEKKKWEEDKKKDPLAKILGKLAEYGLIPLFIPYTDSNEPIVKEIKWMEKSRNQSVR |
| Ref Seq. | RLDKDMFIQALERFLSWESWNLKVKEEYEKVEKEYKTLEERIKEDIQALKALEQYEKERQEQLLRDTLNTN |
| WP_09514251 | EYRLSKRGLRGWREIIQKWLKMDENEPSEKYLEVFKDYQRKHPREAGDYSVYEFLSKKENHFIWRNHPEYP |
| 5.1 | YLYATFCEIDKKKKDAKQQATFTLADPINHPLWVRFEERSGSNLNKYRILTEQLHTEKLKKKLTVQLDRLI |
| | YPTESGGWEEKGKVDIVLLPSRQFYNQIFLDIEEKGKHAFTYKDESIKFPLKGTLGGARVQFDRDHLRRYP |
| | HKVESGNVGRIYFNMTVNIEPTESPVSKSLKIHRDDFPKVVNFKPKELTEWIKDSKGKKLKSGIESLEIGL |
| | RVMSIDLGQRQAAAASIFEVVDQKPDIEGKLFFPIKGTELYAVHRASFNIKLPGETLVKSREVLRKAREDN |
| | LKLMNQKLNFLRNVLHFQQFEDITEREKRVTKWISRQENSDVPLVYQDELIQIRELMYKPYKDWVAFLKQL |
| | HKRLEVEIGKEVKHWRKSLSDGRKGLYGISLKNIDEIDRTRKFLLRWSLRPTEPGEVRRLEPGQRFAIDQL |
| | NHLNALKEDRLKKMANTIIMHALGYCYDVRKKKWQAKNPACQIILFEDLSNYNPYEERSRFENSKLMKWSR |
| | REIPRQVALQGEIYGLQVGEVGAQFSSRFHAKTGSPGIRCSVVTKEKLQDNRFFKNLQREGRLTLDKIAVL |
| | KEGDLYPDKGGEKFISLSKDRKCVTTHADINAAQNLQKRFWTRTHGFYKVYCKAYQVDGQTVYIPESKDQK |
| | QKIIEEFGEGYFILKDGVYEWVNAGKLKIKKGSSKQSSSELVDSDILKDSFDLASELKGEKLMLYRDPSGN |
| | VFPSDKWMAAGVFFGKLERILISKLTNQYSISTIEDDSSKQSM (SEQ ID NO: 126) |
| ThCas12b | MSEKTTQRAYTLRLNRASGECAVCQNNSCDCWHDALWATHKAVNRGAKAFGDWLLTLRGGLCHTLVEMEVP |
| Thermomonas | AKGNNPPQRPTDQERRDRRVLLALSWLSVEDEHGAPKEFIVATGRDSADDRAKKVEEKLREILEKRDFQEH |
| hydrothermalis | EIDAWLQDCGPSLKAHIREDAVWVNRRALFDAAVERIKTLTWEEAWDFLEPFFGTQYFAGIGDGKDKDDAE |
| Ref Seq. | GPARQGEKAKDLVQKAGQWLSARFGIGTGADFMSMAEAYEKIAKWASQAQNGDNGKATIEKLACALRPSEP |
| WP_07275483 | PTLDTVLKCISGPGHKSATREYLKTLDKKSTVTQEDLNQLRKLADEDARNCRKKVGKKGKKPWADEVLKDV |
| 8 | ENSCELTYLQDNSPARHREFSVMLDHAARRVSMAHSWIKKAEQRRRQFESDAQKLKNLQERAPSAVEWLDR |
| | FCESRSMTTGANTGSGYRIRKRAIEGWSYVVQAWAEASCDTEDKRIAAARKVQADPEIEKFGDIQLFEALA |
| | ADEAICVWRDQEGTQNPSILIDYVTGKTAEHNQKRFKVPAYRHPDELRHPVFCDFGNSRWSIQFAIHKEIR |
| | DRDKGAKQDTRQLQNRHGLKMRLWNGRSMTDVNLHWSSKRLTADLALDQNPNPNPTEVTRADRLGRAASSA |
| | FDHVKIKNVFNEKEWNGRLQAPRAELDRIAKLEEQGKTEQAEKLRKRLRWYVSFSPCLSPSGPFIVYAGQH |
| | NIQPKRSGQYAPHAQANKGRARLAQLILSRLPDLRILSVDLGHRFAAACAVWETLSSDAFRREIQGLNVLA |
| | GGSGEGDLFLHVEMTGDDGKRRTVVYRRIGPDQLLDNTPHPAPWARLDRQFLIKLQGEDEGVREASNEELW |
| | TVHKLEVEVGRTVPLIDRMVRSGFGKTEKQKERLKKLRELGWISAMPNEPSAETDEKEGEIRSISRSVDEL |
| | MSSALGTLRLALKRHGNRARIAFAMTADYKPMPGGQKYYFHEAKEASKNDDETKRRDNQIEFLQDALSLWH |
| | DLFSSPDWEDNEAKKLWQNHIATLPNYQTPEEISAELKRVERNKKRKENRDKLRTAAKALAENDQLRQHLH |
| | DTWKERWESDDQQWKERLRSLKDWIFPRGKAEDNPSIRHVGGLSITRINTISGLYQILKAFKMRPEPDDLR |
| | KNIPQKGDDELENFNRRLLEARDRLREQRVKQLASRIIEAALGVGRIKIPKNGKLPKRPRTTVDTPCHAVV |
| | IESLKTYRPDDLRTRRENRQLMQWSSAKVRKYLKEGCELYGLHFLEVPANYTSRQCSRTGLPGIRCDDVPT |
| | GDFLKAPWWRRAINTAREKNGGDAKDRFLVDLYDHLNNLQSKGEALPATVRVPRQGGNLFIAGAQLDDTNK |
| | ERRAIQADLNAAANIGLRALLDPDWRGRWWYVPCKDGTSEPALDRIEGSTAFNDVRSLPTGDNSSRRAPRE |
| | IENLWRDPSGDSLESGTWSPTRAYWDTVQSRVIELLRRHAGLPTS (SEQ ID NO: 127) |
| LsCas12b | MSIRSFKLKLKTKSGVNAEQLRRGLWRTHQLINDGIAYYMNWLVLLRQEDLFIRNKETNEIEKRSKEEIQA |
| Laceyella | VLLERVHKQQQRNQWSGEVDEQTLLQALRQLYEEIVPSVIGKSGNASLKARFFLGPLVDPNNKTTKDVSKS |
| sacchari | GPTPKWKKMKDAGDPNWVQEYEKYMAERQTLVRLEEMGLIPLFPMYTDEVGDIHWLPQASGYTRTWDRDMF |
| WP_13222189 | QQAIERLLSWESWNRRVRERRAQFEKKTHDFASRFSESDVQWMNKLREYEAQQEKSLEENAFAPNEPYALT |
| 4.1 | KKALRGWERVYHSWMRLDSAASEEAYWQEVATCQTAMRGEFGDPAIYQFLAQKENHDIWRGYPERVIDFAE |
| | LNHLQRELRRAKEDATFTLPDSVDHPLWVRYEAPGGTNIHGYDLVQDTKRNLTLILDKFILPDENGSWHEV |
| | KKVPFSLAKSKQFHRQVWLQEEQKQKKREVVFYDYSTNLPHLGTLAGAKLQWDRNFLNKRTQQQ1EETGEI |
| | GKVFFNISVDVRPAVEVKNGRLQNGLGKALTVLTHPDGTKIVTGWKAEQLEKWVGESGRVSSLGLDSLSEG |
| | LRVMSIDLGQRTSATVSVFEITKEAPDNPYKFFYQLEGTEMFAVHQRSFLLALPGENPPQKIKQMREIRWK |
| | ERNRIKQQVDQLSAILRLHKKVNEDERIQAIDKLLQKVASWQLNEEIATAWNQALSQLYSKAKENDLQWNQ |
| | AIKNAHHQLEPVVGKQISLWRKDLSTGRQGIAGLSLWSIEELEATKKLLTRWSKRSREPGVVKRIERFETF |
| | AKQIQHHINQVKENRLKQLANLIVMTALGYKYDQEQKKWIEVYPACQVVLFENLRSYRFSFERSRRENKKL |
| | MEWSHRSIPKLVQMQGELFGLQVADVYAAYSSRYHGRTGAPGIRCHALTEADLRNETNIIHELIEAGFIKE |
| | EHRPYLQQGDLVPWSGGELFATLQKPYDNPRILTLHADINAAQNIQKRFWHPSMWFRVNCESVMEGEIVTY |
| | VPKNKTVHKKQGKTFRFVKVEGSDVYEWAKWSKNRNKNTFSSITERKPPSSMILFRDPSGTFFKEQEWVEQ |
| | KTFWGKVQSMIQAYMKKTIVRQRMEE (SEQ ID NO: 128) |
| DtCas12b | MVLGRKDDTAELRRALWTTHEHVNLAVAEVERVLLRCRGRSYWTLDRRGDPVHVPESQVAEDALAMAREAQ |
| Dsulfonatronum | RRNGWPVVGEDEEILLALRYLYEQIVPSCLLDDLGKPLKGDAQKIGTNYAGPLFDSDTCRRDEGKDVACCG |
| thiodismutans | PFHEVAGKYLGALPEWATPISKQEFDGKDASHLRFKATGGDDAFFRVSIEKANAWYEDPANQDALKNKAYN |
| WP_03138643 | KDDWKKEKDKGISSWAVKYIQKQLQLGQDPRTEVRRKLWLELGLLPLFIPVFDKTMVGNLWNRLAVRLALA |
| 7 | HLLSWESWNHRAVQDQALARAKRDELAALFLGMEDGFAGLREYELRRNESIKQHAFEPVDRPYVVSGRALR |
| | SWTRVREEWLRHGDTQESRKNICNRLQDRLRGKFGDPDVFHWLAEDGQEALWKERDCVTSFSLLNDADGLL |
| | EKRKGYALMTFADARLHPRWAMYEAPGGSNLRTYQIRKTENGLWADVVLLSPRNESAAVEEKTFNVRLAPS |
| | GQLSNVSFDQIQKGSKMVGRCRYQSANQQFEGLLGGAEILFDRKRIANEQHGATDLASKPGHVWFKLTLDV |
| | RPQAPQGWLDGKGRPALPPEAKHFKTALSNKSKFADQVRPGLRVLSVDLGVRSFAACSVFELVRGGPDQGT |
| | YFPAADGRTVDDPEKLWAKHERSFKITLPGENPSRKEEIARRAAMEELRSLNGDIRRLKAILRLSVLQEDD |
| | PRTEHLRLFMEAIVDDPAKSALNAELFKGFGDDRFRSTPDLWKQHCHFFHDKAEKVVAERFSRWRTETRPK |
| | SSSWQDWRERRGYAGGKSYWAVTYLEAVRGLILRWNMRGRTYGEVNRQDKKQFGTVASALLHHINQLKEDR |
| | IKTGADMIIQAARGFVPRKNGAGWVQVHEPCRLILFEDLARYRFRTDRSRRENSRLMRWSHREIVNEVGMQ |
| | GELYGLHVDTTEAGFSSRYLASSGAPGVRCRHLVEEDFHDGLPGMHLVGELDWLLPKDKDRTANEARRLLG |
| | GMVRPGMLVPWDGGELFATLNAASQLHVIHADINAAQNLQRRFWGRCGEAIRIVCNQLSVDGSTRYEMAKA |
| | PKARLLGALQQLKNGDAPFHLTSIPNSQKPENSYVMTPTNAGKKYRAGPGEKSSGEEDELALDIVEQAEEL |
| | AQGRKTFFRDPSGVFFAPDRWLPSEIYWSRIRRRIWQVTLERNSSGRQERAEMDEMPY |
| | (SEQ ID NO: 129) |

[0187] The base editors described herein may also comprise Cas12a/Cpf1 (dCpf 1) variants that may be used as a guide nucleotide sequence-programmable DNA-binding protein domain. The Cas12a/Cpf1 protein has a RuvC-like endonuclease domain that is similar to the RuvC domain of Cas9 but does not have a HNH endonuclease domain, and the N-terminal of Cpf1 does not have the alfa-helical recognition lobe of Cas9. It was shown in Zetsche et al., Cell, 163, 759-771, 2015 (which is incorporated herein by reference) that, the RuvC-like domain of Cpf1 is responsible for cleaving both DNA strands and inactivation of the RuvC-like domain inactivates Cpf1 nuclease activity.

(viii) napDNAbps that Recognize Non-Canonical PAM Sequences

[0188] In some embodiments, the napDNAbp is a nucleic acid programmable DNA binding protein that does not require a canonical (NGG) PAM sequence. In some embodiments, the napDNAbp is an argonaute protein. One example of such a nucleic acid programmable DNA binding protein is an Argonaute protein from Natronobacterium gregoryi (NgAgo). NgAgo is a ssDNA-guided endonuclease. NgAgo binds 5′ phosphorylated ssDNA of ˜24 nucleotides (gDNA) to guide it to its target site and will make DNA double-strand breaks at the gDNA site. In contrast to Cas9, the NgAgo-gDNA system does not require a protospacer-adjacent motif (PAM). Using a nuclease inactive NgAgo (dNgAgo) can greatly expand the bases that may be targeted. The characterization and use of NgAgo have been described in Gao et al., Nat Biotechnol., 2016 Jul; 34(7):768-73. PubMed PMID: 27136078; Swarts et al., Nature. 507(7491) (2014):258-61; and Swarts et al., Nucleic Acids Res. 43(10) (2015):5120-9, each of which is incorporated herein by reference.

[0189] In some embodiments, the disclosure provides napDNAbp domains that comprise SpCas9 variants that recognize and work best with NRRH, NRCH, and NRTH PAMs. See International Application No. PCT/US2019/47996, which published as International Publication No. WO 2020/041751 on Feb. 27, 2020, incorporated by reference herein. In some embodiments, the disclosed base editors comprise a napDNAbp domain selected from SpCas9-NRRH, SpCas9-NRTH, and SpCas9-NRCH.

[0190] In some embodiments, the disclosed base editors comprise a napDNAbp domain that has a sequence that is at least 90%, at least 95%, at least 98%, or at least 99% identical to SpCas9-NRRH. In some embodiments, the disclosed base editors comprise a napDNAbp domain that comprises SpCas9-NRRH. The SpCas9-NRRH has an amino acid sequence as presented in SEQ ID NO: 435 (underligned residues are mutated relative to SpCas9, as set forth in SEQ ID NO: 326):

(SEQ ID NO: 435)
MDKKYSIGLDIGTNSVGWAVITDEYKVPSKKFKVL
GNTDRHSIKKNLIGALLFDSGETAEATRLKRTARR
RYTRRKNRICYLQEIFSNEMAKVDDSFFHRLEESF
LVEEDKKHERHPIFGNIVDEVAYHEKYPTIYHLRK
KLVDSTDKADLRLIYLALAHMIKFRGHFLIEGDLN
PDNSDVDKLFIQLVQTYNQLFEENPINASGVDAKA
ILSARLSKSRRLENLIAQLPGEKKNGLFGNLIALS
LGLTPNFKSNFDLAEDAKLQLSKDTYDDDLDNLLA
QIGDQYADLFLAAKNLSDAILLSDILRVNTEITKA
PLSASMVKRYDEHHQDLTLLKALVRQQLPEKYKEI
FFDQSKNGYAGYIDGGASQEEFYKFIKPILEKMDG
TEELLVKLNREDLLRKQRTFDNGIIPHQIHLGELH
AILRRQGDFYPFLKDNREKIEKILTFRIPYYVGPL
ARGNSRFAWMTRKSEETITPWNFEEVVDKGASAQS
FIERMTNFDKNLPNEKVLPKHSLLYEYFTVYNELT
KVKYVTEGMRKPAFLSGEQKKAIVDLLFKTNRKVT
VKQLKEDYFKKIECFDSVEISGVEDRFNASLGTYH
DLLKIIKDKDFLDNEENEDILEDIVLTLTLFEDRE
MIEERLKTYAHLFDDKVMKQLKRLRYTGWGRLSRK
LINGIRDKQSGKTILDFLKSDGFANRNFMQLIHDD
SLTFKEDIQKAQVSGQGDSLHEHIANLAGSPAIKK
GILQTVKVVDELVKVMGGHKPENIVIEMARENQTT
QKGQKNSRERMKRIEEGIKELGSQILKEHPVENTQ
LQNEKLYLYYLQNGRDMYVDQELDINRLSDYDVDH
IVPQSFLKDDSIDNKVLTRSDKNRGKSDNVPSEEV
VKKMKNYWRQLLNAKLITQRKFDNLTKAERGGLSE
LDKAGFIKRQLVETRQITKHVAQILDSRMNTKYDE
NDKLIREVKVITLKSKLVSDFRKDFQFYKVREINN
YHHAHDAYLNAVVGTALIKKYPKLESEFVYGDYKV
YDVRKMIAKSEQEIGKATAKYFFYSNIMNFFKTEI
TLANGEIRKRPLIETNGETGEIVWDKGRDFATVRK
VLSMPQVNIVKKTEVQTGGFSKESILPKGNSDKLI
ARKKDWDPKKYGGFNSPTAAYSVLVVAKVEKGKSK
KLKSVKELLGITIMERSSFEKNPIGFLEAKGYKEV
KKDLIIKLPKYSLFELENGRKRMLASAGyLHKGNE
LALPSKYVNFLYLASHYEKLKGSPEDNEQKQLFVE
QHKHYLDEIIEQISEFSKRVILADANLDKVLSAYN
KHRDKPIREQAENIIHLFTLTNLGVPAAFKYFDTT
IDKKRYTSTKEVLDATLIHQSITGLYETRIDLSQL
GGD.

[0191] In some embodiments, the disclosed base editors comprise a napDNAbp domain that has a sequence that is at least 90%, at least 95%, at least 98%, or at least 99% identical to SpCas9-NRCH. In some embodiments, the disclosed base editors comprise a napDNAbp domain that comprises SpCas9-NRCH. An example of an NRCH PAM is CACC (5′-CACC-3′). The SpCas9-NRCH has an amino acid sequence as presented in SEQ ID NO: 436 (underligned residues are mutated relative to SpCas9):

(SEQ ID NO: 436)
MDKKYSIGLDIGTNSVGWAVITDEYKVPSKKFKVL
GNTDRHSIKKNLIGALLFDSGETAEATRLKRTARR
RYTRRKNRICYLQEIFSNEMAKVDDSFFHRLEESF
LVEEDKKHERHPIFGNIVDEVAYHEKYPTIYHLRK
KLVDSTDKADLRLIYLALAHMIKFRGHFLIEGDLN
PDNSDVDKLFIQLVQTYNQLFEENPINASGVDAKA
ILSARLSKSRRLENLIAQLPGEKKNGLFGNLIALS
LGLTPNFKSNFDLAEDAKLQLSKDTYDDDLDNLLA
QIGDQYADLFLAAKNLSDAILLSDILRVNTEITKA
PLSASMVKRYDEHHQDLTLLKALVRQQLPEKYKEI
FFDQSKNGYAGYIDGGASQEEFYKFIKPILEKMDG
TEELLVKLNREDLLRKQRTFDNGIIPHQIHLGELH
AILRRQGDFYPFLKDNREKIEKILTFRIPYYVGPL
ARGNSRFAWMTRKSEETITPWNFEEVVDKGASAQS
FIERMTNFDKNLPNEKVLPKHSLLYEYFTVYNELT
KVKYVTEGMRKPAFLSGEQKKAIVDLLFKTNRKVT
VKQLKEDYFKKIECFDSVEISGVEDRFNASLGTYH
DLLKIIKDKDFLDNEENEDILEDIVLTLTLFEDRE
MIEERLKTYAHLFDDKVMKQLKRLRYTGWGRLSRK
LINGIRDKQSGKTILDFLKSDGFANRNFMQLIHDD
SLTFKEDIQKAQVSGQGDSLHEHIANLAGSPAIKK
GILQTVKVVDELVKVMGGHKPENIVIEMARENQTT
QKGQKNSRERMKRIEEGIKELGSQILKEHPVENTQ
LQNEKLYLYYLQNGRDMYVDQELDINRLSDYDVDH
IVPQSFLKDDSIDNKVLTRSDKNRGKSDNVPSEEV
VKKMKNYWRQLLNAKLITQRKFDNLTKAERGGLSE
LDKAGFIKRQLVETRQITKHVAQILDSRMNTKYDE
NDKLIREVKVITLKSKLVSDFRKDFQFYKVREINN
YHHAHDAYLNAVVGTALIKKYPKLESEFVYGDYKV
YDVRKMIAKSEQEIGKATAKYFFYSNIMNFFKTEI
TLANGEIRKRPLIETNGETGEIVWDKGRDFATVRK
VLSMPQVNIVKKTEVQTGGFSKESILPKGNSDKLI
ARKKDWDPKKYGGFNSPTVAYSVLVVAKVEKGKSK
KLKSVKELLGITIMERSSFEKNPIDFLEAKGYKEV
KKDLIIKLPKYSLFELENGRKRMLASAGVLQKGNE
LALPSKYVNFLYLASHYEKLKGSPEDNEQKQLFVE
QHKHYLDEIIEQISEFSKRVILADANLDKVLSAYN
KHRDKPIREQAENIIHLFTLTNLGAPAAFKYFDTT
INRKQYNTTKEVLDATLIRQSITGLYETRIDLSQL
GGD

[0192] In some embodiments, the disclosed base editors comprise a napDNAbp domain that has a sequence that is at least 90%, at least 95%, at least 98%, or at least 99% identical to SpCas9-NRTH. In some embodiments, the disclosed base editors comprise a napDNAbp domain that comprises SpCas9-NRTH. The SpCas9-NRTH has an amino acid sequence as presented in SEQ ID NO: 437 (underligned residues are mutated relative to SpCas9)

(SEQ ID NO: 437)
MDKKYSIGLDIGTNSVGWAVITDEYKVPSKKFKVL
GNTDRHSIKKNLIGALLFDSGETAEATRLKRTARR
RYTRRKNRICYLQEIFSNEMAKVDDSFFHRLEESF
LVEEDKKHERHPIFGNIVDEVAYHEKYPTIYHLRK
KLVDSTDKADLRLIYLALAHMIKFRGHFLIEGDLN
PDNSDVDKLFIQLVQTYNQLFEENPINASGVDAKA
ILSARLSKSRRLENLIAQLPGEKKNGLFGNLIALS
LGLTPNFKSNFDLAEDAKLQLSKDTYDDDLDNLLA
QIGDQYADLFLAAKNLSDAILLSDILRVNTEITKA
PLSASMVKRYDEHHQDLTLLKALVRQQLPEKYKEI
FFDQSKNGYAGYIDGGASQEEFYKFIKPILEKMDG
TEELLVKLNREDLLRKQRTFDNGIIPHQIHLGELH
AILRRQGDFYPFLKDNREKIEKILTFRIPYYVGPL
ARGNSRFAWMTRKSEETITPWNFEEVVDKGASAQS
FIERMTNFDKNLPNEKVLPKHSLLYEYFTVYNELT
KVKYVTEGMRKPAFLSGEQKKAIVDLLFKTNRKVT
VKQLKEDYFKKIECFDSVEISGVEDRFNASLGTYH
DLLKIIKDKDFLDNEENEDILEDIVLTLTLFEDRE
MIEERLKTYAHLFDDKVMKQLKRLRYTGWGRLSRK
LINGIRDKQSGKTILDFLKSDGFANRNFMQLIHDD
SLTFKEDIQKAQVSGQGDSLHEHIANLAGSPAIKK
GILQTVKVVDELVKVMGGHKPENIVIEMARENQTT
QKGQKNSRERMKRIEEGIKELGSQILKEHPVENTQ
LQNEKLYLYYLQNGRDMYVDQELDINRLSDYDVDH
IVPQSFLKDDSIDNKVLTRSDKNRGKSDNVPSEEV
VKKMKNYWRQLLNAKLITQRKFDNLTKAERGGLSE
LDKAGFIKRQLVETRQITKHVAQILDSRMNTKYDE
NDKLIREVKVITLKSKLVSDFRKDFQFYKVREINN
YHHAHDAYLNAVVGTALIKKYPKLESEFVYGDYKV
YDVRKMIAKSEQEIGKATAKYFFYSNIMNFFKTEI
TLANGEIRKRPLIETNGETGEIVWDKGRDFATVRK
VLSMPQVNIVKKTEVQTGGFSKESILPKGNSDKLI
ARKKDWDPKKYGGFNSPTVAYSVLVVAKVEKGKSK
KLKSVKELLGITIMERSSFEKNPIGFLEAKGYKEV
KKDLIIKLPKYSLFELENGRKRMLASASVLHKGNE
LALPSKYVNFLYLASHYEKLKGSSEDNKQKQLFVE
QHKHYLDEIIEQISEFSKRVILADANLDKVLSAYN
KHRDKPIREQAENIIHLFTLTNLGASAAFKYFDTT
IGRKLYTSTKEVLDATLIHQSITGLYETRIDLSQL
GGD

[0193] In some embodiments, the napDNAbp is an argonaute protein. One example of such a nucleic acid programmable DNA binding protein is an Argonaute protein from Natronobacteriurn gregoryi (NgAgo). NgAgo is an ssDNA-guided endonuclease. NgAgo binds 5′ phosphorylated ssDNA of ˜24 nucleotides (gDNA) to guide it to its target site and will make DNA double-strand breaks at the gDNA site. In contrast to Cas9, the NgAgo-gDNA system does not require a protospacer-adjacent motif (PAM). Using a nuclease inactive NgAgo (dNgAgo) can greatly expand the bases that may be targeted. The characterization and use of NgAgo have been described in Gao et al., Nat Biotechnol., 2016 Jul.; 34(7):768-73. PubMed PMID: 27136078; Swarts et al., Nature. 507(7491) (2014):258-61; and Swarts et al., Nucleic Acids Res. 43(10) (2015):5120-9, each of which is incorporated herein by reference.

[0194] In some embodiments, the napDNAbp is a prokaryotic homolog of an Argonaute protein. Prokaryotic homologs of Argonaute proteins are known and have been described, for example, in Makarova K., et al., “Prokaryotic homologs of Argonaute proteins are predicted to function as key components of a novel system of defense against mobile genetic elements”, Biol Direct. 2009 Aug 25; 4:29. doi: 10.1186/1745-6150-4-29, the entire contents of which is hereby incorporated by reference. In some embodiments, the napDNAbp is a Marinitoga piezophila Argunaute (MpAgo) protein. The CRISPR-associated Marinitoga piezophila Argunaute (MpAgo) protein cleaves single-stranded target sequences using 5′-phosphorylated guides. The 5′ guides are used by all known Argonautes. The crystal structure of an MpAgo-RNA complex shows a guide strand binding site comprising residues that block 5′ phosphate interactions. This data suggests the evolution of an Argonaute subclass with noncanonical specificity for a 5′-hydroxylated guide. See, e.g., Kaya et al., “A bacterial Argonaute with noncanonical guide RNA specificity”, Proc Natl Acad Sci USA. 2016 Apr. 12; 113(15):4057-62, the entire contents of which are hereby incorporated by reference). It should be appreciated that other argonaute proteins may be used, and are within the scope of this disclosure.

[0195] In some embodiments, the napDNAbp is a single effector of a microbial CRISPR-Cas system. Single effectors of microbial CRISPR-Cas systems include, without limitation, Cas9, Cpf1, C2c1, C2c2, and C2c3. Typically, microbial CRISPR-Cas systems are divided into Class 1 and Class 2 systems. Class 1 systems have multisubunit effector complexes, while Class 2 systems have a single protein effector. For example, Cas9 and Cpf1 are Class 2 effectors. In addition to Cas9 and Cpf1, three distinct Class 2 CRISPR-Cas systems (C2c1, C2c2, and C2c3) have been described by Shmakov et al., “Discovery and Functional Characterization of Diverse Class 2 CRISPR Cas Systems”, Mol. Cell, 2015 Nov. 5; 60(3): 385-397, the entire contents of which is hereby incorporated by reference. Effectors of two of the systems, C2c1 and C2c3, contain RuvC-like endonuclease domains related to Cpf1. A third system, C2c2 contains an effector with two predicated HEPN RNase domains. Production of mature CRISPR RNA is tracrRNA-independent, unlike production of CRISPR RNA by C2c1. C2c1 depends on both CRISPR RNA and tracrRNA for DNA cleavage. Bacterial C2c2 has been shown to possess a unique RNase activity for CRISPR RNA maturation distinct from its RNA-activated single-stranded RNA degradation activity. These RNase functions are different from each other and from the CRISPR RNA-processing behavior of Cpf1. See, e.g., East-Seletsky, et al., “Two distinct RNase activities of CRISPR-C2c2 enable guide-RNA processing and RNA detection”, Nature, 2016 Oct. 13; 538(7624):270-273, the entire contents of which are hereby incorporated by reference. In vitro biochemical analysis of C2c2 in Leptotrichia shahii has shown that C2c2 is guided by a single CRISPR RNA and can be programed to cleave ssRNA targets carrying complementary protospacers. Catalytic residues in the two conserved HEPN domains mediate cleavage. Mutations in the catalytic residues generate catalytically inactive RNA-binding proteins. See e.g., Abudayyeh et al., “C2c2 is a single-component programmable RNA-guided RNA-targeting CRISPR effector”, Science, 2016 Aug. 5; 353(6299), the entire contents of which are hereby incorporated by reference.

[0196] The crystal structure of Alicyclobaccillus acidoterrastris C2c1 (AacC2c1) has been reported in complex with a chimeric single-molecule guide RNA (sgRNA). See e.g., Liu et al., “C2c1-sgRNA Complex Structure Reveals RNA-Guided DNA Cleavage Mechanism”, Mol. Cell, 2017 Jan. 19; 65(2):310-322, the entire contents of which are hereby incorporated by reference. The crystal structure has also been reported in Alicyclobacillus acidoterrestris C2c1 bound to target DNAs as ternary complexes. See e.g., Yang et al., “PAM-dependent Target DNA Recognition and Cleavage by C2C1 CRISPR-Cas endonuclease”, Cell, 2016 Dec. 15; 167(7):1814-1828, the entire contents of which are hereby incorporated by reference. Catalytically competent conformations of AacC2c1, both with target and non-target DNA strands, have been captured independently positioned within a single RuvC catalytic pocket, with C2c1-mediated cleavage resulting in a staggered seven-nucleotide break of target DNA. Structural comparisons between C2c1 ternary complexes and previously identified Cas9 and Cpf1 counterparts demonstrate the diversity of mechanisms used by CRISPR-Cas9 systems.

[0197] In some embodiments, the napDNAbp may be a C2c1, a C2c2, or a C2c3 protein. In some embodiments, the napDNAbp is a C2c1 protein. In some embodiments, the napDNAbp is a C2c2 protein. In some embodiments, the napDNAbp is a C2c3 protein. In some embodiments, the napDNAbp comprises an amino acid sequence that is at least 85%, at least 90%, at least 91%, at least 92%, at least 93%, at least 94%, at least 95%, at least 96%, at least 97%, at least 98%, at least 99%, or at least 99.5% identical to a naturally-occurring C2c1, C2c2, or C2c3 protein. In some embodiments, the napDNAbp is a naturally-occurring C2c1, C2c2, or C2c3 protein.

[0198] Some aspects of the disclosure provide Cas9 domains that have different PAM specificities. Typically, Cas9 proteins, such as Cas9 from S. pyogenes (spCas9), require a canonical NGG PAM sequence to bind a particular nucleic acid region. This may limit the ability to edit desired bases within a genome. In some embodiments, the base editors described herein may need to be placed at a precise location, for example where a target base is placed within a 4 base region (e.g., a “editing window”), which is approximately 15 bases upstream of the PAM. See Komor, A. C., et al., “Programmable editing of a target base in genomic DNA without double-stranded DNA cleavage” Nature 533, 420-424 (2016), the entire contents of which are hereby incorporated by reference. Accordingly, in some embodiments, any of the base editors described herein may contain a Cas9 domain that is capable of binding a nucleotide sequence that does not contain a canonical (e.g., NGG) PAM sequence. Cas9 domains that bind to non-canonical PAM sequences have been described in the art and would be apparent to the skilled artisan. For example, Cas9 domains that bind non-canonical PAM sequences have been described in Kleinstiver, B. P., et al., “Engineered CRISPR-Cas9 nucleases with altered PAM specificities” Nature 523, 481-485 (2015); and Kleinstiver, B. P., et al., “Broadening the targeting range of Staphylococcus aureus CRISPR-Cas9 by modifying PAM recognition” Nature Biotechnology 33, 1293-1298 (2015); the entire contents of each are hereby incorporated by reference.

[0199] For example, a napDNAbp domain with altered PAM specificity, such as a domain with at least 80%, at least 85%, at least 90%, at least 95%, or at least 99% sequence identity with wild type Francisella novicida Cpf1 (SEQ ID NO: 130) (D917, E1006, and D1255), which has the following amino acid sequence:

(SEQ ID NO: 130)
MSIYQEFVNKYSLSKTLRFELIPQGKTLENIKARG
LILDDEKRAKDYKKAKQIIDKYHQFFIEEILSSVC
ISEDLLQNYSDVYFKLKKSDDDNLQKDFKSAKDTI
KKQISEYIKDSEKFKNLFNQNLIDAKKGQESDLIL
WLKQSKDNGIELFKANSDITDIDEALEIIKSFKGW
TTYFKGFHENRKNVYSSNDIPTSIIYRIVDDNLPK
FLENKAKYESLKDKAPEAINYEQIKKDLAEELTFD
IDYKTSEVNQRVFSLDEVFEIANFNNYLNQSGITK
FNTIIGGKFVNGENTKRKGINEYINLYSQQINDKT
LKKYKMSVLFKQILSDTESKSFVIDKLEDDSDVVT
TMQSFYEQIAAFKTVEEKSIKETLSLLFDDLKAQK
LDLSKIYFKNDKSLTDLSQQVFDDYSVIGTAVLEY
ITQQIAPKNLDNPSKKEQELIAKKTEKAKYLSLET
IKLALEEFNKHRDIDKQCRFEEILANFAAIPMIFD
EIAQNKDNLAQISIKYQNQGKKDLLQASAEDDVKA
IKDLLDQTNNLLHKLKIFHISQSEDKANILDKDEH
FYLVFEECYFELANIVPLYNKIRNYITQKPYSDEK
FKLNFENSTLANGWDKNKEPDNTAILFIKDDKYYL
GVMNKKNNKIFDDKAIKENKGEGYKKIVYKLLPGA
NKMLPKVFFSAKSIKFYNPSEDILRIRNHSTHTKN
GSPQKGYEKFEFNIEDCRKFIDFYKQSISKHPEWK
DFGFRFSDTQRYNSIDEFYREVENQGYKLTFENIS
ESYIDSVVNQGKLYLFQIYNKDFSAYSKGRPNLHT
LYWKALFDERNLQDVVYKLNGEAELFYRKQSIPKK
ITHPAKEAIANKNKDNPKKESVFEYDLIKDKRFTE
DKFFFHCPITINFKSSGANKFNDEINLLLKEKAND
VHILSIDRGERHLAYYTLVDGKGNIIKQDTFNIIG
NDRMKTNYHDKLAAIEKDRDSARKDWKKINNIKEM
KEGYLSQVVHEIAKLVIEYNAIVVFEDLNFGFKRG
RFKVEKQVYQKLEKMLIEKLNYLVFKDNEFDKTGG
VLRAYQLTAPFETFKKMGKQTGIIYYVPAGFTSKI
CPVTGFVNQLYPKYESVSKSQEFFSKFDKICYNLD
KGYFEFSFDYKNFGDKAAKGKWTIASFGSRLINFR
NSDKNHNWDTREVYPTKELEKLLKDYSIEYGHGEC
IKAAICGESDKKFFAKLTSVLNTILQMRNSKTGTE
LDYLISPVADVNGNFFDSRQAPKNMPQDADANGAY
HIGLKGLMLLGRIKNNQEGKKLNLVIKNEEYFEFV
QNRNN

[0200] An additional napDNAbp domain with altered PAM specificity, such as a domain having at least 80%, at least 85%, at least 90%, at least 95%, or at least 99% sequence identity with wild type Geobacillus thermodenitrificans Cas9 (SEQ ID NO: 131), which has the following amino acid sequence:

(SEQ ID NO: 131)
MKYKIGLDIGITSIGWAVINLDIPRIEDLGVRIFD
RAENPKTGESLALPRRLARSARRRLRRRKHRLERI
RRLFVREGILTKEELNKLFEKKHEIDVWQLRVEAL
DRKLNNDELARILLHLAKRRGFRSNRKSERTNKEN
STMLKHIEENQSILSSYRTVAEMVVKDPKFSLHKR
NKEDNYTNTVARDDLEREIKLIFAKQREYGNIVCT
EAFEHEYISIWASQRPFASKDDIEKKVGFCTFEPK
EKRAPKATYTFQSFTVWEHINKLRLVSPGGIRALT
DDERRLIYKQAFHKNKITFHDVRTLLNLPDDTRFK
GLLYDRNTTLKENEKVRFLELGAYHKIRKAIDSVY
GKGAAKSFRPIDFDTFGYALTMFKDDTDIRSYLRN
EYEQNGKRMENLADKVYDEELIEELLNLSFSKFGH
LSLKALRNILPYMEQGEVYSTACERAGYTFTGPKK
KQKTVLLPNIPPIANPVVMRALTQARKVVNAIIKK
YGSPVSIHIELARELSQSFDERRKMQKEQEGNRKK
NETAIRQLVEYGLTLNPTGLDIVKFKLWSEQNGKC
AYSLQPIEIERLLEPGYTEVDHVIPYSRSLDDSYT
NKVLVLTKENREKGNRTPAEYLGLGSERWQQFETF
VLTNKQFSKKKRDRLLRLHYDENEENEFKNRNLND
TRYISRFLANFIREHLKFADSDDKQKVYTVNGRIT
AHLRSRWNFNKNREESNLHHAVDAAIVACTTPSDI
ARVTAFYQRREQNKELSKKTDPQFPQPWPHFADEL
QARLSKNPKESIKALNLGNYDNEKLESLQPVFVSR
MPKRSITGAAHQETLRRYIGIDERSGKIQTVVKKK
LSEIQLDKTGHFPMYGKESDPRTYEAIRQRLLEHN
NDPKKAFQEPLYKPKKNGELGPIIRTIKIIDTTNQ
VIPLNDGKTVAYNSNIVRVDVFEKDGKYYCVPIYT
IDMMKGILPNKAIEPNKPYSEWKEMTEDYTFRFSL
YPNDLIRIEFPREKTIKTAVGEEIKIKDLFAYYQT
IDSSNGGLSLVSHDNNFSLRSIGSRTLKRFEKYQV
DVLGNIYKVRGEKRVGVASSSHSKAGETIRPL

[0201] In some embodiments, the nucleic acid programmable DNA binding protein (napDNAbp) is a nucleic acid programmable DNA binding protein that does not require a canonical (NGG) PAM sequence. In some embodiments, the napDNAbp is an argonaute protein. One example of such a nucleic acid programmable DNA binding protein is an Argonaute protein from Natronobacterium gregoryi (NgAgo). NgAgo is an ssDNA-guided endonuclease. NgAgo binds 5′ phosphorylated ssDNA of ˜24 nucleotides (gDNA) to guide it to its target site and will make DNA double-strand breaks at the gDNA site. In contrast to Cas9, the NgAgo-gDNA system does not require a protospacer-adjacent motif (PAM). Using a nuclease inactive NgAgo (dNgAgo) can greatly expand the bases that may be targeted. The characterization and use of NgAgo have been described in Gao et al., Nat Biotechnol., 34(7): 768-73 (2016), PubMed PMID: 27136078; Swarts et al., Nature, 507(7491): 258-61 (2014); and Swarts et al., Nucleic Acids Res. 43(10) (2015): 5120-9, each of which is incorporated herein by reference. The sequence of Natronobacterium gregoryi Argonaute is provided in SEQ ID NO: 132.

[0202] The disclosed base editors may comprise a napDNAbp domain having at least 80%, at least 85%, at least 90%, at least 95%, or at least 99% sequence identity with wild type Natronobacterium gregoryi Argonaute (SEQ ID NO: 132), which has the following amino acid sequence:

(SEQ ID NO: 132)
MTVIDLDSTTTADELTSGHTYDISVTLTGVYDNTD
EQHPRMSLAFEQDNGERRYITLWKNTTPKDVFTYD
YATGSTYIFTNIDYEVKDGYENLTATYQTTVENAT
AQEVGTTDEDETFAGGEPLDHHLDDALNETPDDAE
TESDSGHVMTSFASRDQLPEWTLHTYTLTATDGAK
TDTEYARRTLAYTVRQELYTDHDAAPVATDGLMLL
TPEPLGETPLDLDCGVRVEADETRTLDYTTAKDRL
LARELVEEGLKRSLWDDYLVRGIDEVLSKEPVLTC
DEFDLHERYDLSVEVGHSGRAYLHINFRHRFVPKL
TLADIDDDNIYPGLRVKTTYRPRRGHIVWGLRDEC
ATDSLNTLGNQSVVAYHRNNQTPINTDLLDAIEAA
DRRVVETRRQGHGDDAVSFPQELLAVEPNTHQIKQ
FASDGFHQQARSKTRLSASRCSEKAQAFAERLDPV
RLNGSTVEFSSEFFTGNNEQQLRLLYENGESVLTF
RDGARGAHPDETFSKGIVNPPESFEVAVVLPEQQA
DTCKAQWDTMADLLNQAGAPPTRSETVQYDAFSSP
ESISLNVAGAIDPSEVDAAFVVLPPDQEGFADLAS
PTETYDELKKALANMGIYSQMAYFDRFRDAKIFYT
RNVALGLLAAAGGVAFTTEHAMPGDADMFIGIDVS
RSYPEDGASGQINIAATATAVYKDGTILGHSSTRP
QLGEKLQSTDVRDIMKNAILGYQQVTGESPTHIVI
HRDGFMNEDLDPATEFLNEQGVEYDIVEIRKQPQT
RLLAVSDVQYDTPVKSIAAINQNEPRATVATFGAP
EYLATRDGGGLPRPIQIERVAGETDIETLTRQVYL
LSQSHIQVHNSTARLPITTAYADQASTHATKGYLV
QTGAFESNVGFL

(ix) Cas9 Variants with Modified PAM Specificities

[0203] The base editors of the present disclosure may also comprise Cas9 variants with modified PAM specificities. Some aspects of this disclosure provide Cas9 proteins that exhibit activity on a target sequence that does not comprise the canonical PAM (5′-NGG-3′, where N is A, C, G, or T) at its 3′-end. In some embodiments, the Cas9 protein exhibits activity on a target sequence comprising a 5′-NGG-3′ PAM sequence at its 3′-end. In some embodiments, the Cas9 protein exhibits activity on a target sequence comprising a 5′-NNG-3′ PAM sequence at its 3′-end. In some embodiments, the Cas9 protein exhibits activity on a target sequence comprising a 5′-NNA-3′ PAM sequence at its 3′-end. In some embodiments, the Cas9 protein exhibits activity on a target sequence comprising a 5′-NNC-3′ PAM sequence at its 3′-end. In some embodiments, the Cas9 protein exhibits activity on a target sequence comprising a 5′-NNT-3′ PAM sequence at its 3′-end. In some embodiments, the Cas9 protein exhibits activity on a target sequence comprising a 5′-NGT-3′ PAM sequence at its 3′-end. In some embodiments, the Cas9 protein exhibits activity on a target sequence comprising a 5′-NGA-3′ PAM sequence at its 3′-end. In some embodiments, the Cas9 protein exhibits activity on a target sequence comprising a 5′-NGC-3′ PAM sequence at its 3′-end. In some embodiments, the Cas9 protein exhibits activity on a target sequence comprising a 5′-NAA-3′ PAM sequence at its 3′-end. In some embodiments, the Cas9 protein exhibits activity on a target sequence comprising a 5′-NAC-3′ PAM sequence at its 3′-end. In some embodiments, the Cas9 protein exhibits activity on a target sequence comprising a 5′-NAT-3′ PAM sequence at its 3′-end. In still other embodiments, the Cas9 protein exhibits activity on a target sequence comprising a 5′-NAG-3′ PAM sequence at its 3′-end.

[0204] In some embodiments, the disclosed adenine base editors comprise a napDNAbp domain comprising a SpCas9-NG, which has a PAM that corresponds to NGN. In some embodiments, the disclosed base editors comprise a napDNAbp domain that has a sequence that is at least 90%, at least 95%, at least 98%, or at least 99% identical to SpCas9-NG. The seauence of SpCas9-NG is illustrated below:

(SEQ ID NO: 153)
MDKKYSIGLAIGTNSVGWAVITDEYKVPSKKFKVL
GNTDRHSIKKNLIGALLFDSGETAEATRLKRTARR
RYTRRKNRICYLQEIFSNEMAKVDDSFFHRLEESF
LVEEDKKHERHPIFGNIVDEVAYHEKYPTIYHLRK
KLVDSTDKADLRLIYLALAHMIKFRGHFLIEGDLN
PDNSDVDKLFIQLVQTYNQLFEENPINASGVDAKA
ILSARLSKSRRLENLIAQLPGEKKNGLFGNLIALS
LGLTPNFKSNFDLAEDAKLQLSKDTYDDDLDNLLA
QIGDQYADLFLAAKNLSDAILLSDILRVNTEITKA
PLSASMIKRYDEHHQDLTLLKALVRQQLPEKYKEI
FFDQSKNGYAGYIDGGASQEEFYKFIKPILEKMDG
TEELLVKLNREDLLRKQRTFDNGSIPHQIHLGELH
AILRRQEDFYPFLKDNREKIEKILTFRIPYYVGPL
ARGNSRFAWMTRKSEETITPWNFEEVVDKGASAQS
FIERMTNFDKNLPNEKVLPKHSLLYEYFTVYNELT
KVKYVTEGMRKPAFLSGEQKKAIVDLLFKTNRKVT
VKQLKEDYFKKIECFDSVEISGVEDRFNASLGTYH
DLLKIIKDKDFLDNEENEDILEDIVLTLTLFEDRE
MIEERLKTYAHLFDDKVMKQLKRRRYTGWGRLSRK
LINGIRDKQSGKTILDFLKSDGFANRNFMQLIHDD
SLTFKEDIQKAQVSGQGDSLHEHIANLAGSPAIKK
GILQTVKVVDELVKVMGRHKPENIVIEMARENQTT
QKGQKNSRERMKRIEEGIKELGSQILKEHPVENTQ
LQNEKLYLYYLQNGRDMYVDQELDINRLSDYDVDH
IVPQSFLKDDSIDNKVLTRSDKNRGKSDNVPSEEV
VKKMKNYWRQLLNAKLITQRKFDNLTKAERGGLSE
LDKAGFIKRQLVETRQITKHVAQILDSRMNTKYDE
NDKLIREVKVITLKSKLVSDFRKDFQFYKVREINN
YHHAHDAYLNAVVGTALIKKYPKLESEFVYGDYKV
YDVRKMIAKSEQEIGKATAKYFFYSNIMNFFKTEI
TLANGEIRKRPLIETNGETGEIVWDKGRDFATVRK
VLSMPQVNIVKKTEVQTGGFSKESIRPKRNSDKLI
ARKKDWDPKKYGGFVSPTVAYSVLVVAKVEKGKSK
KLKSVKELLGITIMERSSFEKNPIDFLEAKGYKEV
KKDLIIKLPKYSLFELENGRKRMLASARFLQKGNE
LALPSKYVNFLYLASHYEKLKGSPEDNEQKQLFVE
QHKHYLDEIIEQISEFSKRVILADANLDKVLSAYN
KHRDKPIREQAENIIHLFTLTNLGAPRAFKYFDTT
IDRKVYRSTKEVLDATLIHQSITGLYETRIDLSQL
GGD

[0205] In some embodiments, the disclosed base editors comprise a napDNAbp domain comprising a SaCas9-KKH, which has a PAM that corresponds to NNNRRT. This Cas9 variant contains the amino acid substitutions DlOA, E782K, N968K, and R1015H relative to wild-type SaCas9. In some embodiments, the disclosed base editors comprise a napDNAbp domain that has a sequence that is at least 90%, at least 95%, at least 98%, or at least 99% identical to SaCas9-KKH. The sequence of SaCas9-KKH is illustrated below: S. aureus Cas9 nickase KKH (D10A/E782K/N968K/R1015H) (SaCas9-KKH)

(SEQ ID NO: 154)
MGKRNYILGLAIGITSVGYGIIDYETRDVIDAGVR
LFKEANVENNEGRRSKRGARRLKRRRRHRIQRVKK
LLFDYNLLTDHSELSGINPYEARVKGLSQKLSEEE
FSAALLHLAKRRGVHNVNEVEEDTGNELSTKEQIS
RNSKALEEKYVAELQLERLKKDGEVRGSINRFKTS
DYVKEAKQLLKVQKAYHQLDQSFIDTYIDLLETRR
TYYEGPGEGSPFGWKDIKEWYEMLMGHCTYFPEEL
RSVKYAYNADLYNALNDLNNLVITRDENEKLEYYE
KFQIIENVFKQKKKPTLKQIAKEILVNEEDIKGYR
VTSTGKPEFTNLKVYHDIKDITARKEIIENAELLD
QIAKILTIYQSSEDIQEELTNLNSELTQEEIEQIS
NLKGYTGTHNLSLKAINLILDELWHTNDNQIAIFN
RLKLVPKKVDLSQQKEIPTTLVDDFILSPVVKRSF
IQSIKVINAIIKKYGLPNDIIIELAREKNSKDAQK
MINEMQKRNRQTNERIEEIIRTTGKENAKYLIEKI
KLHDMQEGKCLYSLEAIPLEDLLNNPFNYEVDHII
PRSVSFDNSFNNKVLVKQEENSKKGNRTPFQYLSS
SDSKISYETFKKHILNLAKGKGRISKTKKEYLLEE
RDINRFSVQKDFINRNLVDTRYATRGLMNLLRSYF
RVNNLDVKVKSINGGFTSFLRRKWKFKKERNKGYK
HHAEDALIIANADFIFKEWKKLDKAKKVMENQMFE
EKQAESMPEIETEQEYKEIFITPHQIKHIKDFKDY
KYSHRVDKKPNRKLINDTLYSTRKDDKGNTLIVNN
LNGLYDKDNDKLKKLINKSPEKLLMYHHDPQTYQK
LKLIMEQYGDEKNPLYKYYEETGNYLTKYSKKDNG
PVIKKIKYYGNKLNAHLDITDDYPNSRNKVVKLSL
KPYRFDVYLDNGVYKFVTVKNLDVIKKENYYEVNS
KCYEEAKKLKKISNQAEFIASFYKNDLIKINGELY
RVIGVNNDLLNRIEVNMIDITYREYLENMNDKRPP
HIIKTIASKTQSIKKYSTDILGNLYEVKSKKHPQI
IKKG

[0206] In some embodiments, the disclosed adenine base editors comprise a napDNAbp domain comprising a xCas9, an evolved variant of SpCas9. In some embodiments, the disclosed base editors comprise a napDNAbp domain that has a sequence that is at least 90%, at least 95%, at least 98%, or at least 99% identical to xCas9. The sequence of xCas9 is illustrated below:

(SEQ ID NO: 155)
MDKKYSIGLAIGTNSVGWAVITDEYKVPSKKFKVL
GNTDRHSIKKNLIGALLFDSGETAEATRLKRTARR
RYTRRKNRICYLQEIFSNEMAKVDDSFFHRLEESF
LVEEDKKHERHPIFGNIVDEVAYHEKYPTIYHLRK
KLVDSTDKADLRLIYLALAHMIKFRGHFLIEGDLN
PDNSDVDKLFIQLVQTYNQLFEENPINASGVDAKA
ILSARLSKSRRLENLIAQLPGEKKNGLFGNLIALS
LGLTPNFKSNFDLAEDTKLQLSKDTYDDDLDNLLA
QIGDQYADLFLAAKNLSDAILLSDILRVNTEITKA
PLSASMIKLYDEHHQDLTLLKALVRQQLPEKYKEI
FFDQSKNGYAGYIDGGASQEEFYKFIKPILEKMDG
TEELLVKLNREDLLRKQRTFDNGIIPHQIHLGELH
AILRRQEDFYPFLKDNREKIEKILTFRIPYYVGPL
ARGNSRFAWMTRKSEETITPWNFEKVVDKGASAQS
FIERMTNFDKNLPNEKVLPKHSLLYEYFTVYNELT
KVKYVTEGMRKPAFLSGDQKKAIVDLLFKTNRKVT
VKQLKEDYFKKIECFDSVEISGVEDRFNASLGTYH
DLLKIIKDKDFLDNEENEDILEDIVLTLTLFEDRE
MIEERLKTYAHLFDDKVMKQLKRRRYTGWGRLSRK
LINGIRDKQSGKTILDFLKSDGFANRNFIQLIHDD
SLTFKEDIQKAQVSGQGDSLHEHIANLAGSPAIKK
GILQTVKVVDELVKVMGRHKPENIVIEMARENQTT
QKGQKNSRERMKRIEEGIKELGSQILKEHPVENTQ
LQNEKLYLYYLQNGRDMYVDQELDINRLSDYDVDH
IVPQSFLKDDSIDNKVLTRSDKNRGKSDNVPSEEV
VKKMKNYWRQLLNAKLITQRKFDNLTKAERGGLSE
LDKAGFIKRQLVETRQITKHVAQILDSRMNTKYDE
NDKLIREVKVITLKSKLVSDFRKDFQFYKVREINN
YHHAHDAYLNAVVGTALIKKYPKLESEFVYGDYKV
YDVRKMIAKSEQEIGKATAKYFFYSNIMNFFKTEI
TLANGEIRKRPLIETNGETGEIVWDKGRDFATVRK
VLSMPQVNIVKKTEVQTGGFSKESILPKRNSDKLI
ARKKDWDPKKYGGFDSPTVAYSVLVVAKVEKGKSK
KLKSVKELLGITIMERSSFEKNPIDFLEAKGYKEV
KKDLIIKLPKYSLFELENGRKRMLASAGVLQKGNE
LALPSKYVNFLYLASHYEKLKGSPEDNEQKQLFVE
QHKHYLDEIIEQISEFSKRVILADANLDKVLSAYN
KHRDKPIREQAENIIHLFTLTNLGAPAAFKYFDTT
IDRKRYTSTKEVLDATLIHQSITGLYETRIDLSQL
GGD

[0207] It should be appreciated that any of the amino acid mutations described herein, (e.g., A262T) from a first amino acid residue (e.g., A) to a second amino acid residue (e.g., T) may also include mutations from the first amino acid residue to an amino acid residue that is similar to (e.g., conserved) the second amino acid residue. For example, mutation of an amino acid with a hydrophobic side chain (e.g., alanine, valine, isoleucine, leucine, methionine, phenylalanine, tyrosine, or tryptophan) may be a mutation to a second amino acid with a different hydrophobic side chain (e.g., alanine, valine, isoleucine, leucine, methionine, phenylalanine, tyrosine, or tryptophan). For example, a mutation of an alanine to a threonine (e.g., a A262T mutation) may also be a mutation from an alanine to an amino acid that is similar in size and chemical properties to a threonine, for example, serine. As another example, mutation of an amino acid with a positively charged side chain (e.g., arginine, histidine, or lysine) may be a mutation to a second amino acid with a different positively charged side chain (e.g., arginine, histidine, or lysine). As another example, mutation of an amino acid with a polar side chain (e.g., serine, threonine, asparagine, or glutamine) may be a mutation to a second amino acid with a different polar side chain (e.g., serine, threonine, asparagine, or glutamine). Additional similar amino acid pairs include, but are not limited to, the following: phenylalanine and tyrosine; asparagine and glutamine; methionine and cysteine; aspartic acid and glutamic acid; and arginine and lysine. The skilled artisan would recognize that such conservative amino acid substitutions will likely have minor effects on protein structure and are likely to be well tolerated without compromising function. In some embodiments, any amino of the amino acid mutations provided herein from one amino acid to a threonine may be an amino acid mutation to a serine. In some embodiments, any amino of the amino acid mutations provided herein from one amino acid to an arginine may be an amino acid mutation to a lysine. In some embodiments, any amino of the amino acid mutations provided herein from one amino acid to an isoleucine, may be an amino acid mutation to an alanine, valine, methionine, or leucine. In some embodiments, any amino of the amino acid mutations provided herein from one amino acid to a lysine may be an amino acid mutation to an arginine. In some embodiments, any amino of the amino acid mutations provided herein from one amino acid to an aspartic acid may be an amino acid mutation to a glutamic acid or asparagine. In some embodiments, any amino of the amino acid mutations provided herein from one amino acid to a valine may be an amino acid mutation to an alanine, isoleucine, methionine, or leucine. In some embodiments, any amino of the amino acid mutations provided herein from one amino acid to a glycine may be an amino acid mutation to an alanine. It should be appreciated, however, that additional conserved amino acid residues would be recognized by the skilled artisan and any of the amino acid mutations to other conserved amino acid residues are also within the scope of this disclosure.

[0208] In some embodiments, the present disclosure may utilize any of the Cas9 variants disclosed in the SEQUENCES section herein.

[0209] In some embodiments, the Cas9 protein comprises a combination of mutations that exhibit activity on a target sequence comprising a 5′-NAA-3′ PAM sequence at its 3′-end. In some embodiments, the combinations of mutations are present in any one of the clones listed in Table 1. In some embodiments, the combinations of mutations are conservative mutations of the clones listed in Table 1. In some embodiments, the Cas9 protein comprises the combination of mutations of any one of the Cas9 clones listed in Table 1.

TABLE 1
NAA PAM Clones
Mutations from wild-type SpCas9 (e.g., SEQ ID NO: )

D177N, K218R, D614N, D1135N, P1137S, E1219V, A1320V, A1323D, R1333K
D177N, K218R, D614N, D1135N, E1219V, Q1221H, H1264Y, A1320V, R1333K
A10T, I322V, S409I, E427G, G715C, D1135N, E1219V, Q1221H, H1264Y, A1320V, R1333K
A367T, K710E, R1114G, D1135N, P1137S, E1219V, Q1221H, H1264Y, A1320V, R1333K
A10T, I322V, S409I, E427G, R753G, D861N, D1135N, K1188R, E1219V, Q1221H, H1264H,
A1320V, R1333K
A10T, I322V, S409I, E427G, R654L, V743I, R753G, M1021T, D1135N, D1180G, K1211R,
E1219V, Q1221H, H1264Y, A1320V, R1333K
A10T, I322V, S409I, E427G, V743I, R753G, E762G, D1135N, D1180G, K1211R, E1219V,
Q1221H, H1264Y, A1320V, R1333K
A10T, I322V, S409I, E427G, R753G, D1135N, D1180G, K1211R, E1219V, Q1221H, H1264Y,
S1274R, A1320V, R1333K
A10T, I322V, S409I, E427G, A589S, R753G, D1135N, E1219V, Q1221H, H1264H, A1320V,
R1333K
A10T, I322V, S409I, E427G, R753G, E757K, G865G, D1135N, E1219V, Q1221H, H1264Y,
A1320V, R1333K
A10T, I322V, S409I, E427G, R654L, R753G, E757K, D1135N, E1219V, Q1221H, H1264Y,
A1320V, R1333K
A10T, I322V, S409I, E427G, K599R, M631A, R654L, K673E, V743I, R753G, N758H, E762G,
D1135N, D1180G, E1219V, Q1221H, Q1256R, H1264Y, A1320V, A1323D, R1333K
A10T, I322V, S409I, E427G, R654L, K673E, V743I, R753G, E762G, N869S, N1054D, R1114G,
D1135N, D1180G, E1219V, Q1221H, H1264Y, A1320V, A1323D, R1333K
A10T, I322V, S409I, E427G, R654L, L727I, V743I, R753G, E762G, R859S, N946D, F1134L,
D1135N, D1180G, E1219V, Q1221H, H1264Y, N1317T, A1320V, A1323D, R1333K
A10T, I322V, S409I, E427G, R654L, K673E, V743I, R753G, E762G, N803S, N869S, Y1016D,
G1077D, R1114G, F1134L, D1135N, D1180G, E1219V, Q1221H, H1264Y, V1290G, L1318S,
A1320V, A1323D, R1333K
A10T, I322V, S409I, E427G, R654L, K673E, V743I, R753G, E762G, N803S, N869S, Y1016D,
G1077D, R1114G, F1134L, D1135N, K1151E, D1180G, E1219V, Q1221H, H1264Y, V1290G,
L1318S, A1320V, R1333K
A10T, I322V, S409I, E427G, R654L, K673E, V743I, R753G, E762G, N803S, N869S, Y1016D,
G1077D, R1114G, F1134L, D1135N, D1180G, E1219V, Q1221H, H1264Y, V1290G, L1318S,
A1320V, A1323D, R1333K
A10T, I322V, S409I, E427G, R654L, K673E, F693L, V743I, R753G, E762G, N803S, N869S,
L921P, Y1016D, G1077D, F1080S, R1114G, D1135N, D1180G, E1219V, Q1221H, H1264Y,
L1318S, A1320V, A1323D, R1333K
A10T, I322V, S409I, E427G, E630K, R654L, K673E, V743I, R753G, E762G, Q768H, N803S,
N869S, Y1016D, G1077D, R1114G, F1134L, D1135N, D1180G, E1219V, Q1221H, H1264Y,
L1318S, A1320V, R1333K
A10T, I322V, S409I, E427G, R654L, K673E, F693L, V743I, R753G, E762G, Q768H, N803S,
N869S, Y1016D, G1077D, R1114G, F1134L, D1135N, D1180G, E1219V, Q1221H, G1223S,
H1264Y, L1318S, A1320V, R1333K
A10T, I322V, S409I, E427G, R654L, K673E, F693L, V743I, R753G, E762G, N803S, N869S,
L921P, Y1016D, G1077D, F1801S, R1114G, D1135N, D1180G, E1219V, Q1221H, H1264Y,
L1318S, A1320V, A1323D, R1333K
A10T, I322V, S409I, E427G, R654L, V743I, R753G, M1021T, D1135N, D1180G, K1211R,
E1219V, Q1221H, H1264Y, A1320V, R1333K
A10T, I322V, S409I, E427G, R654L, K673E, V743I, R753G, E762G, M673I, N803S, N869S,
G1077D, R1114G, D1135N, V1139A, D1180G, E1219V, Q1221H, A1320V, R1333K
A10T, I322V, S409I, E427G, R654L, K673E, V743I, R753G, E762G, N803S, N869S, R1114G,
D1135N, E1219V, Q1221H, A1320V, R1333K

[0210] In some embodiments, the Cas9 protein comprises an amino acid sequence that is at least 80% identical to the amino acid sequence of a Cas9 protein as provided by any one of the variants of Table 1. In some embodiments, the Cas9 protein comprises an amino acid sequence that is at least 85%, at least 90%, at least 92%, at least 95%, at least 96%, at least 97%, at least 98%, at least 99%, or at least 99.5% identical to the amino acid sequence of a Cas9 protein as provided by any one of the variants of Table 1.

[0211] In some embodiments, the Cas9 protein exhibits an increased activity on a target sequence that does not comprise the canonical PAM (5′-NGG-3′) at its 3′ end as compared to Streptococcus pyogenes Cas9 as provided by SEQ ID NO: 74. In some embodiments, the Cas9 protein exhibits an activity on a target sequence having a 3′ end that is not directly adjacent to the canonical PAM sequence (5′-NGG-3′) that is at least 5-fold increased as compared to the activity of Streptococcus pyogenes Cas9 as provided by SEQ ID NO: 74 on the same target sequence. In some embodiments, the Cas9 protein exhibits an activity on a target sequence that is not directly adjacent to the canonical PAM sequence (5′-NGG-3′) that is at least 10-fold, at least 50-fold, at least 100-fold, at least 500-fold, at least 1,000-fold, at least 5,000-fold, at least 10,000-fold, at least 50,000-fold, at least 100,000-fold, at least 500,000-fold, or at least 1,000,000-fold increased as compared to the activity of Streptococcus pyogenes as provided by SEQ ID NO: 74 on the same target sequence. In some embodiments, the 3′ end of the target sequence is directly adjacent to an AAA, GAA, CAA, or TAA sequence. In some embodiments, the Cas9 protein comprises a combination of mutations that exhibit activity on a target sequence comprising a 5⁻-NAC-3′ PAM sequence at its 3′-end. In some embodiments, the combinations of mutations are present in any one of the clones listed in Table 2. In some embodiments, the combinations of mutations are conservative mutations of the clones listed in Table 2. In some embodiments, the Cas9 protein comprises the combination of mutations of any one of the Cas9 clones listed in Table 2.

TABLE 2
NAC PAM Clones
MUTATIONS FROM WILD-TYPE SPCAS9 (E.G. , SEQ ID NO 74)

T472I, R753G, K890E, D1332N, R1335Q, T1337N
I1057S, D1135N, P1301S, R1335Q, T1337N
T472I, R753G, D1332N, R1335Q, T1337N
D1135N, E1219V, D1332N, R1335Q, T1337N
T472I, R753G, K890E, D1332N, R1335Q, T1337N
I1057S, D1135N, P1301S, R1335Q, T1337N
T472I, R753G, D1332N, R1335C, T1337N
T472I, R753G, Q771H, D1332N, R1335Q, T1337N
E627K, T638P, K652T, R753G, N803S, K959N, R1114G, D1135N, E1219V, D1332N, R1335Q,
T1337N
E627K, T638P, K652T, R753G, N803S, K959N, R1114G, D1135N, K1156E, E1219V, D1332N,
R1335Q, T1337N
E627K, T638P, V647I, R753G, N803S, K959N, G1030R, I1055E, R1114G, D1135N, E1219V,
D1332N, R1335Q, T1337N
E627K, E630G, T638P, V647A, G687R, N767D, N803S, K959N, R1114G, D1135N, E1219V,
D1332G, R1335Q, T1337N
E627K, T638P, R753G, N803S, K959N, R1114G, D1135N, E1219V, N1266H, D1332N, F1335Q,
T1337N
E627K, T638P, R753G, N803S, K959N, I1057T, R1114G, D1135N, E1219V, D1332N, R1335Q,
T1337N
E627K, T638P, R753G, N803S, K959N, R1114G, D1135N, E1219V, D1332N, R1335Q, T1337N
E627K, M631I, T638P, R753G, N803S, K959N, Y1036H, R1114G, D1135N, E1219V, D1251G,
D1332G, R1335Q, T1337N
E627K, T638P, R753G, N803S, V875I, K959N, Y1016C, R1114G, D1135N, E1219V, D1251G,
D1332G, R1335Q, T1337N, I1348V
K608R, E627K, T638P, V647I, R654L, R753G, N803S, T804A, K848N, V922A, K959N, R1114G,
D1135N, E1219V, D1332N, R1335Q, T1337N
K608R, E627K, T638P, V647I, R753G, N803S, V922A, K959N, K1014N, V1015A, R1114G,
D1135N, K1156N, E1219V, N1252D, D1332N, R1335Q, T1337N
K608R, E627K, R629G, T638P, V647I, A711T, R753G, K775R, K789E, N803S, K959N, V1015A,
Y1036H, R1114G, D1135N, E1219V, N1286H, D1332N, R1335Q, T1337N
K608R, E627K, T638P, V647I, T740A, R753G, N803S, K948E, K959N, Y1016S, R1114G,
D1135N, E1219V, N1286H, D1332N, R1335Q, T1337N
K608R, E627K, T638P, V647I, T740A, N803S, K948E, K959N, Y1016S, R1114G, D1135N,
E1219V, N1286H, D1332N, R1335Q, T1337N
I670S, K608R, E627K, E630G, T638P, V647I, R653K, R753G, I795L, K797N, N803S, K866R,
K890N, K959N, Y1016C, R1114G, D1135N, E1219V, D1332N, R1335Q, I1337N
K608R, E627K, T638P, V647I, T740A, G752R, R753G, K797N, N803S, K948E, K959N, V1015A,
Y1016S, R1114G, D1135N, E1219V, N1266H, D1332N, R1335Q, T1337N
I570T, A589V, K608R, E627K, T638P, V647I, R654L, Q716R, R753G, N803S, K948E, K959N,
Y1016S, R1114G, D1135N, E1207G, E1219V, N1234D, D1332N, R1335Q, T1337N
K608R, E627K, R629G, T638P, V647I, R654L, Q740R, R753G, N803S, K959N, N990S, T995S,
V1015A, Y1036D, R1114G, D1135N, E1207G, E1219V, N1234D, N1266H, D1332N, R1335Q,
T1337N
I562F, V565D, I570T, K608R, L625S, E627K, T638P, V647I, R654I, G752R, R753G, N803S,
N808D, K959N, M1021L, R1114G, D1135N, N1177S, N1234D, D1332N, R1335Q, T1337N
I562F, I570T, K608R, E627K, T638P, V647I, R753G, E790A, N803S, K959N, V1015A, Y1036H,
R1114G, D1135N, D1180E, A1184T, E1219V, D1332N, R1335Q, T1337N
I570T, K608R, E627K, T638P, V647I, R654H, R753G, E790A, N803S, K959N, V1015A, R1114G,
D1127A, D1135N, E1219V, D1332N, R1335Q, T1337N
I570T, K608R, L625S, E627K, T638P, V647I, R654I, T703P, R753G, N803S, N808D, K959N,
M1021L, R1114G, D1135N, E1219V, D1332N, R1335Q, T1337N
I570S, K608R, E627K, E630G, T638P, V647I, R653K, R753G, I795L, N803S, K866R, K890N,
K959N, Y1016C, R1114G, D1135N, E1219V, D1332N, R1335Q, T1337N
I570T, K608R, E627K, T638P, V647I, R654H, R753G, E790A, N803S, K959N, V1016A, R1114G,
D1135N, E1219V, K1246E, D1332N, R1335Q, T1337N
K608R, E627K, T638P, V647I, R654L, K673E, R753G, E790A, N803S, K948E, K959N, R1114G,
D1127G, D1135N, D1180E, E1219V, N1286H, D1332N, R1335Q, T1337N
K608R, L625S, E627K, T638P, V647I, R654I, I670T, R753G, N803S, N808D, K959N, M1021L,
R1114G, D1135N, E1219V, N1286H, D1332N, R1335Q, T1337N
E627K, M631V, T638P, V647I, K710E, R753G, N803S, N808D, K948E, M1021L, R1114G,
D1135N, E1219V, D1332N, R1335Q, T1337N, S1338T, H1349R

[0212] In some embodiments, the Cas9 protein comprises an amino acid sequence that is at least 80% identical to the amino acid sequence of a Cas9 protein as provided by any one of the variants of Table 2. In some embodiments, the Cas9 protein comprises an amino acid sequence that is at least 85%, at least 90%, at least 92%, at least 95%, at least 96%, at least 97%, at least 98%, at least 99%, or at least 99.5% identical to the amino acid sequence of a Cas9 protein as provided by any one of the variants of Table 2.

[0213] In some embodiments, the Cas9 protein exhibits an increased activity on a target sequence that does not comprise the canonical PAM (5′-NGG-3′) at its 3′ end as compared to Streptococcus pyogenes Cas9 as provided by SEQ ID NO: 74. In some embodiments, the Cas9 protein exhibits an activity on a target sequence having a 3′ end that is not directly adjacent to the canonical PAM sequence (5′-NGG-3′) that is at least 5-fold increased as compared to the activity of Streptococcus pyogenes Cas9 as provided by SEQ ID NO: 74 on the same target sequence. In some embodiments, the Cas9 protein exhibits an activity on a target sequence that is not directly adjacent to the canonical PAM sequence (5′-NGG-3′) that is at least 10-fold, at least 50-fold, at least 100-fold, at least 500-fold, at least 1,000-fold, at least 5,000-fold, at least 10,000-fold, at least 50,000-fold, at least 100,000-fold, at least 500,000-fold, or at least 1,000,000-fold increased as compared to the activity of Streptococcus pyogenes as provided by SEQ ID NO: 74 on the same target sequence. In some embodiments, the 3′ end of the target sequence is directly adjacent to an AAC, GAC, CAC, or TAC sequence.

[0214] In some embodiments, the Cas9 protein comprises a combination of mutations that exhibit activity on a target sequence comprising a 5′-NAT-3′ PAM sequence at its 3′-end. In some embodiments, the combinations of mutations are present in any one of the clones listed in Table 3. In some embodiments, the combinations of mutations are conservative mutations of the clones listed in Table 3. In some embodiments, the Cas9 protein comprises the combination of mutations of any one of the Cas9 clones listed in Table 3.

TABLE 3
NAT PAM Clones
MUTATIONS FROM WILD-TYPE SPCAS9 (E.G. , SEQ ID NO: 74)

K961E, H985Y, D1135N, K1191N, E1219V, Q1221H, A1320A, P1321S, R1335L
D1135N, G1218S, E1219V, Q1221H, P1249S, P1321S, D1322G, R1335L
V743I, R753G, E790A, D1135N, G1218S, E1219V, Q1221H, A1227V, P1249S, N1286K, A1293T,
P1321S, D1322G, R1335L, T1339I
F575S, M631L, R654L, V748I, V743I, R753G, D853E, V922A, R1114G, D1135N, G1218S,
E1219V, Q1221H, A1227V, P1249S, N1286K, A1293T, P1321S, D1322G, R1335L, T1339I
F575S, M631L, R654L, R664K, R753G, D853E, V922A, R1114G, D1135N, D1180G, G1218S,
E1219V, Q1221H, P1249S, N1286K, P1321S, D1322G, R1335L
M631L, R654L, R753G, K797E, D853E, V922A, D1012A, R1114G, D1135N, G1218S, E1219V,
Q1221H, P1249S, N1317K, P1321S, D1322G, R1335L
F575S, M631L, R654L, R664K, R753G, D853E, V922A, R1114G, Y1131C, D1135N, D1180G,
G1218S, E1219V, Q1221H, P1249S, P1321S, D1322G, R1335L
F575S, M631L, R654L, R664K, R753G, D853E, V922A, R1114G, Y1131C, D1135N, D1180G,
G1218S, E1219V, Q1221H, P1249S, P1321S, D1322G, R1335L
F575S, D596Y, M631L, R654L, R664K, R753G, D853E, V922A, R1114G, Y1131C, D1135N,
D1180G, G1218S, E1219V, Q1221H, P1249S, Q1256R, P1321S, D1322G, R1335L
F575S, M631L, R654L, R664K, K710E, V750A, R753G, D853E, V922A, R1114G, Y1131C,
D1135N, D1180G, G1218S, E1219V, Q1221H, P1249S, P1321S, D1322G, R1335L
F575S, M631L, K649R, R654L, R664K, R753G, D853E, V922A, R1114G, Y1131C, D1135N,
K1156E, D1180G, G1218S, E1219V, Q1221H, P1249S, P1321S, D1322G, R1335L
F575S, M631L, R654L, R664K, R753G, D853E, V922A, R1114G, Y1131C, D1135N, D1180G,
G1218S, E1219V, Q1221H, P1249S, P1321S, D1322G, R1335L
F575S, M631L, R654L, R664K, R753G, D853E, V922A, I1057G, R1114G, Y1131C, D1135N,
D1180G, G1218S, E1219V, Q1221H, P1249S, N1308D, P1321S, D1322G, R1335L
M631L, R654L, R753G, D853E, V922A, R1114G, Y1131C, D1135N, E1150V, D1180G, G1218S,
E1219V, Q1221H, P1249S, P1321S, D1332G, R1335L
M631L, R654L, R664K, R753G, D853E, I1057V, Y1131C, D1135N, D1180G, G1218S, E1219V,
Q1221H, P1249S, P1321S, D1332G, R1335L
M631L, R654L, R664K, R753G, I1057V, R1114G, Y1131C, D1135N, D1180G, G1218S, E1219V,
Q1221H, P1249S, P1321S, D1332G, R1335L

[0215] The above description of various napDNAbps which can be used in connection with the presently disclose base editors is not meant to be limiting in any way. The base editors may comprise the canonical SpCas9, or any ortholog Cas9 protein, or any variant Cas9 protein—including any naturally occurring variant, mutant, or otherwise engineered version of Cas9—that is known or which can be made or evolved through a directed evolutionary or otherwise mutagenic process. In various embodiments, the Cas9 or Cas9 variants have a nickase activity, i.e., only cleave of strand of the target DNA sequence. In other embodiments, the Cas9 or Cas9 variants have inactive nucleases, i.e., are “dead” Cas9 proteins. Other variant Cas9 proteins that may be used are those having a smaller molecular weight than the canonical SpCas9 (e.g., for easier delivery) or having modified or rearranged primary amino acid structure (e.g., the circular permutant formats). The base editors described herein may also comprise Cas9 equivalents, including Cas12a/Cpf1 and Cas12b proteins which are the result of convergent evolution. The napDNAbps used herein (e.g., SpCas9, Cas9 variant, or Cas9 equivalents) may also may also contain various modifications that alter/enhance their PAM specificities. Lastly, the application contemplates any Cas9, Cas9 variant, or Cas9 equivalent which has at least 70%, at least 75%, at least 80%, at least 85%, at least 90%, at least 91%, at least 92%, at least 93%, at least 94%, at least 95%, at least 96%, at least 97%, at least 98%, at least 99%, or at least 99.9% sequence identity to a reference Cas9 sequence, such as a reference SpCas9 canonical sequences or a reference Cas9 equivalent (e.g., Cas12a/Cpf1).

[0216] In a particular embodiment, the Cas9 variant having expanded PAM capabilities is SpCas9 (H840A) VRQR, having the following amino acid sequence (with the V, R, Q, R substitutions relative to the SpCas9 (H840A) of SEQ ID NO: 107, shown in bold underline. In some embodiments, the disclosed base editors comprise a napDNAbp domain that comprises SpCas9-VRQR. In addition, the methionine residue in SpCas9 (H840) was removed for SpCas9 (H840A) VRQR):

(SEQ ID NO: 133)
DKKYSIGLDIGTNSVGWAVITDEYKVPSKKFKVLG
NTDRHSIKKNLIGALLFDSGETAEATRLKRTARRR
YTRRKNRICYLQEIFSNEMAKVDDSFFHRLEESFL
VEEDKKHERHPIFGNIVDEVAYHEKYPTIYHLRKK
LVDSTDKADLRLIYLALAHMIKFRGHFLIEGDLNP
DNSDVDKLFIQLVQTYNQLFEENPINASGVDAKAI
LSARLSKSRRLENLIAQLPGEKKNGLFGNLIALSL
GLTPNFKSNFDLAEDAKLQLSKDTYDDDLDNLLAQ
IGDQYADLFLAAKNLSDAILLSDILRVNTEITKAP
LSASMIKRYDEHHQDLTLLKALVRQQLPEKYKEIF
FDQSKNGYAGYIDGGASQEEFYKFIKPILEKMDGT
EELLVKLNREDLLRKQRTFDNGSIPHQIHLGELHA
ILRRQEDFYPFLKDNREKIEKILTFRIPYYVGPLA
RGNSRFAWMTRKSEETITPWNFEEVVDKGASAQSF
IERMTNFDKNLPNEKVLPKHSLLYEYFTVYNELTK
VKYVTEGMRKPAFLSGEQKKAIVDLLFKTNRKVTV
KQLKEDYFKKIECFDSVEISGVEDRFNASLGTYHD
LLKIIKDKDFLDNEENEDILEDIVLTLTLFEDREM
IEERLKTYAHLFDDKVMKQLKRRRYTGWGRLSRKL
INGIRDKQSGKTILDFLKSDGFANRNFMQLIHDDS
LTFKEDIQKAQVSGQGDSLHEHIANLAGSPAIKKG
ILQTVKVVDELVKVMGRHKPENIVIEMARENQTTQ
KGQKNSRERMKRIEEGIKELGSQILKEHPVENTQL
QNEKLYLYYLQNGRDMYVDQELDINRLSDYDVDAI
VPQSFLKDDSIDNKVLTRSDKNRGKSDNVPSEEVV
KKMKNYWRQLLNAKLITQRKFDNLTKAERGGLSEL
DKAGFIKRQLVETRQITKHVAQILDSRMNTKYDEN
DKLIREVKVITLKSKLVSDFRKDFQFYKVREINNY
HHAHDAYLNAVVGTALIKKYPKLESEFVYGDYKVY
DVRKMIAKSEQEIGKATAKYFFYSNIMNFFKTEIT
LANGEIRKRPLIETNGETGEIVWDKGRDFATVRKV
LSMPQVNIVKKTEVQTGGFSKESILPKRNSDKLIA
RKKDWDPKKYGGFVSPTVAYSVLVVAKVEKGKSKK
LKSVKELLGITIMERSSFEKNPIDFLEAKGYKEVK
KDLIIKLPKYSLFELENGRKRMLASARELQKGNEL
ALPSKYVNFLYLASHYEKLKGSPEDNEQKQLFVEQ
HKHYLDEIIEQISEFSKRVILADANLDKVLSAYNK
HRDKPIREQAENIIHLFTLTNLGAPAAFKYFDTTI
DRKQYRSTKEVLDATLIHQSITGLYETRIDLSQLG
GD

[0217] In another particular embodiment, the Cas9 variant having expanded PAM capabilities is SpCas9 (H840A) VRER, having the following amino acid sequence (with the V, R, E, R substitutions relative to the SpCas9 (H840A) of SEQ ID NO: 107 are shown in bold underline. In addition, the methionine residue in SpCas9 (H840) was removed for SpCas9 (H840A) VRER):

(SEQ ID NO: 134)
DKKYSIGLDIGTNSVGWAVITDEYKVPSKKFKVLG
NTDRHSIKKNLIGALLFDSGETAEATRLKRTARRR
YTRRKNRICYLQEIFSNEMAKVDDSFFHRLEESFL
VEEDKKHERHPIFGNIVDEVAYHEKYPTIYHLRKK
LVDSTDKADLRLIYLALAHMIKFRGHFLIEGDLNP
DNSDVDKLFIQLVQTYNQLFEENPINASGVDAKAI
LSARLSKSRRLENLIAQLPGEKKNGLFGNLIALSL
GLTPNFKSNFDLAEDAKLQLSKDTYDDDLDNLLAQ
IGDQYADLFLAAKNLSDAILLSDILRVNTEITKAP
LSASMIKRYDEHHQDLTLLKALVRQQLPEKYKEIF
FDQSKNGYAGYIDGGASQEEFYKFIKPILEKMDGT
EELLVKLNREDLLRKQRTFDNGSIPHQIHLGELHA
ILRRQEDFYPFLKDNREKIEKILTFRIPYYVGPLA
RGNSRFAWMTRKSEETITPWNFEEVVDKGASAQSF
IERMTNFDKNLPNEKVLPKHSLLYEYFTVYNELTK
VKYVTEGMRKPAFLSGEQKKAIVDLLFKTNRKVTV
KQLKEDYFKKIECFDSVEISGVEDRFNASLGTYHD
LLKIIKDKDFLDNEENEDILEDIVLTLTLFEDREM
IEERLKTYAHLFDDKVMKQLKRRRYTGWGRLSRKL
INGIRDKQSGKTILDFLKSDGFANRNFMQLIHDDS
LTFKEDIQKAQVSGQGDSLHEHIANLAGSPAIKKG
ILQTVKVVDELVKVMGRHKPENIVIEMARENQTTQ
KGQKNSRERMKRIEEGIKELGSQILKEHPVENTQL
QNEKLYLYYLQNGRDMYVDQELDINRLSDYDVDAI
VPQSFLKDDSIDNKVLTRSDKNRGKSDNVPSEEVV
KKMKNYWRQLLNAKLITQRKFDNLTKAERGGLSEL
DKAGFIKRQLVETRQITKHVAQILDSRMNTKYDEN
DKLIREVKVITLKSKLVSDFRKDFQFYKVREINNY
HHAHDAYLNAVVGTALIKKYPKLESEFVYGDYKVY
DVRKMIAKSEQEIGKATAKYFFYSNIMNFFKTEIT
LANGEIRKRPLIETNGETGEIVWDKGRDFATVRKV
LSMPQVNIVKKTEVQTGGFSKESILPKRNSDKLIA
RKKDWDPKKYGGFVSPTVAYSVLVVAKVEKGKSKK
LKSVKELLGITIMERSSFEKNPIDFLEAKGYKEVK
KDLIIKLPKYSLFELENGRKRMLASARELQKGNEL
ALPSKYVNFLYLASHYEKLKGSPEDNEQKQLFVEQ
HKHYLDEIIEQISEFSKRVILADANLDKVLSAYNK
HRDKPIREQAENIIHLFTLTNLGAPAAFKYFDTTI
DRKEYRSTKEVLDATLIHQSITGLYETRIDLSQLG
GD

[0218] In a particular embodiment, the Cas9 variant having expanded PAM capabilities is SpCas9 (H840A) VQR, having the following amino acid sequence (with the V, Q, R substitutions relative to the SpCas9 (H840A) sequence of SEQ ID NO: 107. In some embodiments, the disclosed base editors comprise a napDNAbp domain that comprises SpCas9-VQR.

[0219] VQR-nCas9 (D10A/D1135V/R1335Q/T1337R) S. pyogenes Cas9 Nickase

(SEQ ID NO: 156)
MDKKYSIGLAIGTNSVGWAVITDEYKVPSKKFKVL
GNTDRHSIKKNLIGALLFDSGETAEATRLKRTARR
RYTRRKNRICYLQEIFSNEMAKVDDSFFHRLEESF
LVEEDKKHERHPIFGNIVDEVAYHEKYPTIYHLRK
KLVDSTDKADLRLIYLALAHMIKFRGHFLIEGDLN
PDNSDVDKLFIQLVQTYNQLFEENPINASGVDAKA
ILSARLSKSRRLENLIAQLPGEKKNGLFGNLIALS
LGLTPNFKSNFDLAEDAKLQLSKDTYDDDLDNLLA
QIGDQYADLFLAAKNLSDAILLSDILRVNTEITKA
PLSASMIKRYDEHHQDLTLLKALVRQQLPEKYKEI
FFDQSKNGYAGYIDGGASQEEFYKFIKPILEKMDG
TEELLVKLNREDLLRKQRTFDNGSIPHQIHLGELH
AILRRQEDFYPFLKDNREKIEKILTFRIPYYVGPL
ARGNSRFAWMTRKSEETITPWNFEEVVDKGASAQS
FIERMTNFDKNLPNEKVLPKHSLLYEYFTVYNELT
KVKYVTEGMRKPAFLSGEQKKAIVDLLFKTNRKVT
VKQLKEDYFKKIECFDSVEISGVEDRFNASLGTYH
DLLKIIKDKDFLDNEENEDILEDIVLTLTLFEDRE
MIEERLKTYAHLFDDKVMKQLKRRRYTGWGRLSRK
LINGIRDKQSGKTILDFLKSDGFANRNFMQLIHDD
SLTFKEDIQKAQVSGQGDSLHEHIANLAGSPAIKK
GILQTVKVVDELVKVMGRHKPENIVIEMARENQTT
QKGQKNSRERMKRIEEGIKELGSQILKEHPVENTQ
LQNEKLYLYYLQNGRDMYVDQELDINRLSDYDVDH
IVPQSFLKDDSIDNKVLTRSDKNRGKSDNVPSEEV
VKKMKNYWRQLLNAKLITQRKFDNLTKAERGGLSE
LDKAGFIKRQLVETRQITKHVAQILDSRMNTKYDE
NDKLIREVKVITLKSKLVSDFRKDFQFYKVREINN
YHHAHDAYLNAVVGTALIKKYPKLESEFVYGDYKV
YDVRKMIAKSEQEIGKATAKYFFYSNIMNFFKTEI
TLANGEIRKRPLIETNGETGEIVWDKGRDFATVRK
VLSMPQVNIVKKTEVQTGGFSKESILPKRNSDKLI
ARKKDWDPKKYGGFVSPTVAYSVLVVAKVEKGKSK
KLKSVKELLGITIMERSSFEKNPIDFLEAKGYKEV
KKDLIIKLPKYSLFELENGRKRMLASAGELQKGNE
LALPSKYVNFLYLASHYEKLKGSPEDNEQKQLFVE
QHKHYLDEIIEQISEFSKRVILADANLDKVLSAYN
KHRDKPIREQAENIIHLFTLTNLGAPAAFKYFDTT
IDRKQYRSTKEVLDATLIHQSITGLYETRIDLSQL
GGD

[0220] In another particular embodiment, the Cas9 variant having expanded PAM capabilities is SpCas9 (H840A) EQR, having the D10A, D1135E, R1335Q, and T1337R substitutions relative to the SpCas9 (H840A) sequence of SEQ ID NO: 107. In addition, the methionine residue in SpCas9 (H840) was removed for SpCas9 (H840A) EQR):

(SEQ ID NO: 157)
MDKKYSIGLAIGTNSVGWAVITDEYKVPSKKFKVL
GNTDRHSIKKNLIGALLFDSGETAEATRLKRTARR
RYTRRKNRICYLQEIFSNEMAKVDDSFFHRLEESF
LVEEDKKHERHPIFGNIVDEVAYHEKYPTIYHLRK
KLVDSTDKADLRLIYLALAHMIKFRGHFLIEGDLN
PDNSDVDKLFIQLVQTYNQLFEENPINASGVDAKA
ILSARLSKSRRLENLIAQLPGEKKNGLFGNLIALS
LGLTPNFKSNFDLAEDAKLQLSKDTYDDDLDNLLA
QIGDQYADLFLAAKNLSDAILLSDILRVNTEITKA
PLSASMIKRYDEHHQDLTLLKALVRQQLPEKYKEI
FFDQSKNGYAGYIDGGASQEEFYKFIKPILEKMDG
TEELLVKLNREDLLRKQRTFDNGSIPHQIHLGELH
AILRRQEDFYPFLKDNREKIEKILTFRIPYYVGPL
ARGNSRFAWMTRKSEETITPWNFEEVVDKGASAQS
FIERMTNFDKNLPNEKVLPKHSLLYEYFTVYNELT
KVKYVTEGMRKPAFLSGEQKKAIVDLLFKTNRKVT
VKQLKEDYFKKIECFDSVEISGVEDRFNASLGTYH
DLLKIIKDKDFLDNEENEDILEDIVLTLTLFEDRE
MIEERLKTYAHLFDDKVMKQLKRRRYTGWGRLSRK
LINGIRDKQSGKTILDFLKSDGFANRNFMQLIHDD
SLTFKEDIQKAQVSGQGDSLHEHIANLAGSPAIKK
GILQTVKVVDELVKVMGRHKPENIVIEMARENQTT
QKGQKNSRERMKRIEEGIKELGSQILKEHPVENTQ
LQNEKLYLYYLQNGRDMYVDQELDINRLSDYDVDH
IVPQSFLKDDSIDNKVLTRSDKNRGKSDNVPSEEV
VKKMKNYWRQLLNAKLITQRKFDNLTKAERGGLSE
LDKAGFIKRQLVETRQITKHVAQILDSRMNTKYDE
NDKLIREVKVITLKSKLVSDFRKDFQFYKVREINN
YHHAHDAYLNAVVGTALIKKYPKLESEFVYGDYKV
YDVRKMIAKSEQEIGKATAKYFFYSNIMNFFKTEI
TLANGEIRKRPLIETNGETGEIVWDKGRDFATVRK
VLSMPQVNIVKKTEVQTGGFSKESILPKRNSDKLI
ARKKDWDPKKYGGFESPTVAYSVLVVAKVEKGKSK
KLKSVKELLGITIMERSSFEKNPIDFLEAKGYKEV
KKDLIIKLPKYSLFELENGRKRMLASAGELQKGNE
LALPSKYVNFLYLASHYEKLKGSPEDNEQKQLFVE
QHKHYLDEIIEQISEFSKRVILADANLDKVLSAYN
KHRDKPIREQAENIIHLFTLTNLGAPAAFKYFDTT
IDRKQYRSTKEVLDATLIHQSITGLYETRIDLSQL
GGD

[0221] In addition, any available methods may be utilized to obtain or construct a variant or mutant Cas9 protein. The term “mutation,” as used herein, refers to a substitution of a residue within a sequence, e.g., a nucleic acid or amino acid sequence, with another residue, or a deletion or insertion of one or more residues within a sequence. Mutations are typically described herein by identifying the original residue followed by the position of the residue within the sequence and by the identity of the newly substituted residue. Various methods for making the amino acid substitutions (mutations) provided herein are well known in the art, and are provided by, for example, Green and Sambrook, Molecular Cloning: A Laboratory Manual (4th ed., Cold Spring Harbor Laboratory Press, Cold Spring Harbor, N.Y. (2012)). Mutations can include a variety of categories, such as single base polymorphisms, microduplication regions, indel, and inversions, and is not meant to be limiting in any way. Mutations can include “loss-of-function” mutations which are the normal result of a mutation that reduces or abolishes a protein activity. Most loss-of-function mutations are recessive, because in a heterozygote the second chromosome copy carries an unmutated version of the gene coding for a fully functional protein whose presence compensates for the effect of the mutation. Mutations also embrace “gain-of-function” mutations, which is one which confers an abnormal activity on a protein or cell that is otherwise not present in a normal condition. Many gain-of-function mutations are in regulatory sequences rather than in coding regions, and can therefore have a number of consequences. For example, a mutation might lead to one or more genes being expressed in the wrong tissues, these tissues gaining functions that they normally lack. Because of their nature, gain-of-function mutations are usually dominant.

[0222] Mutations can be introduced into a reference Cas9 protein using site-directed mutagenesis. Older methods of site-directed mutagenesis known in the art rely on sub-cloning of the sequence to be mutated into a vector, such as an M13 bacteriophage vector, that allows the isolation of single-stranded DNA template. In these methods, one anneals a mutagenic primer (i.e., a primer capable of annealing to the site to be mutated but bearing one or more mismatched nucleotides at the site to be mutated) to the single-stranded template and then polymerizes the complement of the template starting from the 3′ end of the mutagenic primer. The resulting duplexes are then transformed into host bacteria and plaques are screened for the desired mutation. More recently, site-directed mutagenesis has employed PCR methodologies, which have the advantage of not requiring a single-stranded template. In addition, methods have been developed that do not require sub-cloning. Several issues must be considered when PCR-based site-directed mutagenesis is performed. First, in these methods it is desirable to reduce the number of PCR cycles to prevent expansion of undesired mutations introduced by the polymerase. Second, a selection must be employed in order to reduce the number of non-mutated parental molecules persisting in the reaction. Third, an extended-length PCR method is preferred in order to allow the use of a single PCR primer set. And fourth, because of the non-template-dependent terminal extension activity of some thermostable polymerases it is often necessary to incorporate an end-polishing step into the procedure prior to blunt-end ligation of the PCR-generated mutant product.

[0223] Mutations may also be introduced by directed evolution processes, such as phage-assisted continuous evolution (PACE) or phage-assisted noncontinuous evolution (PANCE). The term “phage-assisted continuous evolution (PACE),” as used herein, refers to continuous evolution that employs phage as viral vectors. The general concept of PACE technology has been described, for example, in International PCT Application, PCT/US2009/056194, filed Sep. 8, 2009, published as WO 2010/028347 on Mar. 11, 2010; International PCT Application, PCT/US2011/066747, filed Dec. 22, 2011, published as WO 2012/088381 on Jun. 28, 2012; U.S. Application, U.S. Pat. No. 9,023,594, issued May 5, 2015, International PCT Application, PCT/US2015/012022, filed Jan. 20, 2015, published as WO 2015/134121 on Sep. 11, 2015, and International PCT Application, PCT/US2016/027795, filed Apr. 15, 2016, published as WO 2016/168631 on Oct. 20, 2016, the entire contents of each of which are incorporated herein by reference. Variant Cas9s may also be obtain by phage-assisted non-continuous evolution (PANCE), which as used herein, refers to non-continuous evolution that employs phage as viral vectors. PANCE is a simplified technique for rapid in vivo directed evolution using serial flask transfers of evolving ‘selection phage’ (SP), which contain a gene of interest to be evolved, across fresh E. coli host cells, thereby allowing genes inside the host E. coli to be held constant while genes contained in the SP continuously evolve. Serial flask transfers have long served as a widely-accessible approach for laboratory evolution of microbes, and, more recently, analogous approaches have been developed for bacteriophage evolution. The PANCE system features lower stringency than the PACE system.

### (x) Cas9 Circular Permutants

[0224] In various embodiments, the base editors disclosed herein may comprise a circular permutant of Cas9.

[0225] The term “circularly permuted Cas9” or “circular permutant” of Cas9 or “CP-Cas9”) refers to any Cas9 protein, or variant thereof, that occurs or has been modify to engineered as a circular permutant variant, which means the N-terminus and the C-terminus of a Cas9 protein (e.g., a wild type Cas9 protein) have been topically rearranged. Such circularly permuted Cas9 proteins, or variants thereof, retain the ability to bind DNA when complexed with a guide RNA (gRNA). See, Oakes et al., “Protein Engineering of Cas9 for enhanced function,” Methods Enzymol, 2014, 546: 491-511 and Oakes et al., “CRISPR-Cas9 Circular Permutants as Programmable Scaffolds for Genome Modification,” Cell, Jan. 10, 2019, 176: 254-267, each of are incorporated herein by reference. Reference is also made to International Publication No. WO 2020/041751, published Feb. 27, 2020, herein incorporated by reference. The present disclosure contemplates any previously known CP-Cas9 or use a new CP-Cas9 so long as the resulting circularly permuted protein retains the ability to bind DNA when complexed with a guide RNA (gRNA).

[0226] Any of the Cas9 proteins described herein, including any variant, ortholog, or naturally occurring Cas9 or equivalent thereof, may be reconfigured as a circular permutant variant.

[0227] In various embodiments, the circular permutants of Cas9 may have the following structure: N-terminus-[original C-terminus]—[optional linker]—[original N-terminus]-C-terminus.

[0228] As an example, the present disclosure contemplates the following circular permutants of canonical S. pyogenes Cas9 (1368 amino acids of UniProtKB-Q99ZW2 (CAS9_STRP1) (numbering is based on the amino acid position in SEQ ID NO: 74)): N-terminus-[1268-1368]-[optional linker]-[1-1267]-C-terminus; N-terminus-[1168-1368]-[optional linker]-[1-1167]-C-terminus; N-terminus-[1068-1368]-[optional linker]-[1-1067]-C-terminus; N-terminus-[968-1368]-[optional linker]-[1-967]-C-terminus; N-terminus-[868-1368]-[optional linker]-[1-867]-C-terminus; N-terminus-[768-1368]-[optional linker]-[1-767]-C-terminus; N-terminus-[668-1368]-[optional linker]-[1-667]-C-terminus; N-terminus-[568-1368]-[optional linker]-[1-567]-C-terminus; N-terminus-[468-1368]-[optional linker]-[1-467]-C-terminus; N-terminus-[368-1368]-[optional linker]-[1-367]-C-terminus; N-terminus-[268-1368]-[optional linker]-[1-267]-C-terminus; N-terminus-[168-1368]-[optional linker]-[1-167]-C-terminus; N-terminus-[68-1368]-[optional linker]-[1-67]-C-terminus; or N-terminus-[10-1368]-[optional linker]-[1-9]-C-terminus, or the corresponding circular permutants of other Cas9 proteins (including other Cas9 orthologs, variants, etc).

[0229] In particular embodiments, the circular permuant Cas9 has the following structure (based on S. pyogenes Cas9 (1368 amino acids of UniProtKB-Q99ZW2 (CAS9_STRP1) (numbering is based on the amino acid position in SEQ ID NO: 74): N-terminus-[102-1368]-[optional linker]-[1-101]-C-terminus; N-terminus-[1028-1368]-[optional linker]-[1-1027]-C-terminus; N-terminus-[1041-1368]-[optional linker]-[1-1043]-C-terminus; N-terminus-[1249-1368]-[optional linker]-[1-1248]-C-terminus; or N-terminus-[1300-1368]-[optional linker]-[1-1299]-C-terminus, or the corresponding circular permutants of other Cas9 proteins (including other Cas9 orthologs, variants, etc).

[0230] In still other embodiments, the circular permuant Cas9 has the following structure (based on S. pyogenes Cas9 (1368 amino acids of UniProtKB-Q99ZW2 (CAS9_STRP1) (numbering is based on the amino acid position in SEQ ID NO: 74): N-terminus-[103-1368]-[optional linker]-[1-102]-C-terminus; N-terminus-[1029-1368]-[optional linker]-[1-1028]-C-terminus; N-terminus-[1042-1368]-[optional linker]-[1-1041]-C-terminus; N-terminus-[1250-1368]-[optional linker]-[1-1249]-C-terminus; or

[0231] N-terminus-[1301-1368]-[optional linker]-[1-1300]-C-terminus, or the corresponding circular permutants of other Cas9 proteins (including other Cas9 orthologs, variants, etc).

[0232] In some embodiments, the circular permutant can be formed by linking a C-terminal fragment of a Cas9 to an N-terminal fragment of a Cas9, either directly or by using a linker, such as an amino acid linker. In some embodiments, The C-terminal fragment may correspond to the C-terminal 95% or more of the amino acids of a Cas9 (e.g., amino acids about 1300-1368), or the C-terminal 90%, 85%, 80%, 75%, 70%, 65%, 60%, 55%, 50%, 45%, 40%, 35%, 30%, 25%, 20%, 15%, 10%, or 5% or more of a Cas9 (e.g., any one of SEQ ID NOs: 18-25). The N-terminal portion may correspond to the N-terminal 95% or more of the amino acids of a Cas9 (e.g., amino acids about 1-1300), or the N-terminal 90%, 85%, 80%, 75%, 70%, 65%, 60%, 55%, 50%, 45%, 40%, 35%, 30%, 25%, 20%, 15%, 10%, or 5% or more of a Cas9 (e.g., of SEQ ID NO: 74).

[0233] In some embodiments, the circular permutant can be formed by linking a C-terminal fragment of a Cas9 to an N-terminal fragment of a Cas9, either directly or by using a linker, such as an amino acid linker. In some embodiments, the C-terminal fragment that is rearranged to the N-terminus, includes or corresponds to the C-terminal 30% or less of the amino acids of a Cas9 (e.g., amino acids 1012-1368 of SEQ ID NO: 74). In some embodiments, the C-terminal fragment that is rearranged to the N-terminus, includes or corresponds to the C-terminal 30%, 29%, 28%, 27%, 26%, 25%, 24%, 23%, 22%, 21%, 20%, 19%, 18%, 17%, 16%, 15%, 14%, 13%, 12%, 11%, 10%, 9%, 8%, 7%, 6%, 5%, 4%, 3%, 2%, or 1% of the amino acids of a Cas9 (e.g., the Cas9 of SEQ ID NO: 74). In some embodiments, the C-terminal fragment that is rearranged to the N-terminus, includes or corresponds to the C-terminal 410 residues or less of a Cas9 (e.g., the Cas9 of SEQ ID NO: 74). In some embodiments, the C-terminal portion that is rearranged to the N-terminus, includes or corresponds to the C-terminal 410, 400, 390, 380, 370, 360, 350, 340, 330, 320, 310, 300, 290, 280, 270, 260, 250, 240, 230, 220, 210, 200, 190, 180, 170, 160, 150, 140, 130, 120, 110, 100, 90, 80, 70, 60, 50, 40, 30, 20, or 10 residues of a Cas9 (e.g., the Cas9 of SEQ ID NO: 74). In some embodiments, the C-terminal portion that is rearranged to the N-terminus, includes or corresponds to the C-terminal 357, 341, 328, 120, or 69 residues of a Cas9 (e.g., the Cas9 of SEQ ID NO: 74).

[0234] In other embodiments, circular permutant Cas9 variants may be defined as a topological rearrangement of a Cas9 primary structure based on the following method, which is based on S. pyogenes Cas9 of SEQ ID NO: 74: (a) selecting a circular permutant (CP) site corresponding to an internal amino acid residue of the Cas9 primary structure, which dissects the original protein into two halves: an N-terminal region and a C-terminal region; (b) modifying the Cas9 protein sequence (e.g., by genetic engineering techniques) by moving the original C-terminal region (comprising the CP site amino acid) to preceed the original N-terminal region, thereby forming a new N-terminus of the Cas9 protein that now begins with the CP site amino acid residue. The CP site can be located in any domain of the Cas9 protein, including, for example, the helical-II domain, the RuvCIII domain, or the CTD domain. For example, the CP site may be located (relative the S. pyogenes Cas9 of SEQ ID NO: 74) at original amino acid residue 181, 199, 230, 270, 310, 1010, 1016, 1023, 1029, 1041, 1247, 1249, or 1282. Thus, once relocated to the N-terminus, original amino acid 181, 199, 230, 270, 310, 1010, 1016, 1023, 1029, 1041, 1247, 1249, or 1282 would become the new N-terminal amino acid. Nomenclature of these CP-Cas9 proteins may be referred to as Cas9-CP¹⁸¹, Cas9-CP¹⁹⁹, Cas9-CP²³⁰, Cas9-CP²⁷⁰, Cas9-CP³¹⁰, Cas9-CP¹⁰¹⁰, Cas9-CP¹⁰¹⁶, Cas9-CP¹⁰²³, Cas9-CP¹⁰²⁹, Cas9-CP¹⁰⁴¹, Cas9-CP^{1247, Cas}9-CP¹²⁴⁹, and Cas9-CP¹²⁸², respectively. This description is not meant to be limited to making CP variants from SEQ ID NO: 74, but may be implemented to make CP variants in any Cas9 sequence, either at CP sites that correspond to these positions, or at other CP sites entireley. This description is not meant to limit the specific CP sites in any way. Virtually any CP site may be used to form a CP-Cas9 variant.

[0235] Exemplary CP-Cas9 amino acid sequences, based on the Cas9 of SEQ ID NO: 74, are provided below in which linker sequences are indicated by underlining and optional methionine (M) residues are indicated in bold. It should be appreciated that the disclosure provides CP-Cas9 sequences that do not include a linker sequence or that include different linker sequences. It should be appreciated that CP-Cas9 sequences may be based on Cas9 sequences other than that of SEQ ID NO: 74 and any examples provided herein are not meant to be limiting. Exempalry CP-Cas9 sequences are as follows:

| CP name | Sequence | SEQ ID NO: |
|---|---|---|
| CP1012 | DYKVYDVRKMIAKSEQEIGKATAKYFFYSNIMNFFKTEITLANGEIRKRPLIETN | SEQ ID NO: |
| | GETGEIVWDKGRDFATVRKVLSMPQVNIVKKTEVQTGGFSKESILPKRNSDKLIA | 171 |
| | RKKDWDPKKYGGFDSPTVAYSVLVVAKVEKGKSKKLKSVKELLGITIMERSSEEK | |
| | NPIDFLEAKGYKEVKKDLIIKLPKYSLFELENGRKRMLASAGELQKGNELALPSK | |
| | YVNFLYLASHYEKLKGSPEDNEQKQLFVEQHKHYLDEIIEQISEFSKRVILADAN | |
| | LDKVLSAYNKHRDKPIREQAENIIHLFTLTNLGAPAAFKYFDTTIDRKRYTSTKE | |
| | VLDATLIHQSITGLYETRIDLSQLGGDGGSGGSGGSGGSGGSGGSGGDKKYSIGL | |
| | AIGTNSVGWAVITDEYKVPSKKFKVLGNTDRHSIKKNLIGALLFDSGETAEATRL | |
| | KRTARRRYTRRKNRICYLQEIFSNEMAKVDDSFFHRLEESFLVEEDKKHERHPIF | |
| | GNIVDEVAYHEKYPTIYHLRKKLVDSTDKADLRLIYLALAHMIKFRGHFLIEGDL | |
| | NPDNSDVDKLFIQLVQTYNQLFEENPINASGVDAKAILSARLSKSRRLENLIAQL | |
| | PGEKKNGLFGNLIALSLGLTPNFKSNFDLAEDAKLQLSKDTYDDDLDNLLAQIGD | |
| | QYADLFLAAKNLSDAILLSDILRVNTEITKAPLSASMIKRYDEHHQDLTLLKALV | |
| | RQQLPEKYKEIFFDQSKNGYAGYIDGGASQEEFYKFIKPILEKMDGTEELLVKLN | |
| | REDLLRKQRTFDNGSIPHQIHLGELHAILRRQEDFYPFLKDNREKIEKILTFRIP | |
| | YYVGPLARGNSRFAWMTRKSEETITPWNFEEVVDKGASAQSFIERMTNFDKNLPN | |
| | EKVLPKHSLLYEYFTVYNELTKVKYVTEGMRKPAFLSGEQKKAIVDLLFKTNRKV | |
| | TVKQLKEDYFKKIECFDSVEISGVEDRFNASLGTYHDLLKIIKDKDFLDNEENED | |
| | ILEDIVLTLTLFEDREMIEERLKTYAHLFDDKVMKQLKRRRYTGWGRLSRKLING | |
| | IRDKQSGKTILDFLKSDGFANRNFMQLIHDDSLTFKEDIQKAQVSGQGDSLHEHI | |
| | ANLAGSPAIKKGILQTVKVVDELVKVMGRHKPENIVIEMARENQTTQKGQKNSRE | |
| | RMKRIEEGIKELGSQILKEHPVENTQLQNEKLYLYYLQNGRDMYVDQELDINRLS | |
| | DYDVDHIVPQSFLKDDSIDNKVLTRSDKNRGKSDNVPSEEVVKKMKNYWRQLLNA | |
| | KLITQRKFDNLTKAERGGLSELDKAGFIKRQLVETRQITKHVAQILDSRMNTKYD | |
| | ENDKLIREVKVITLKSKLVSDFRKDFQFYKVREINNYHHAHDAYLNAWGTALIK | |
| | KYPKLESEFVYG | |
| CP1028 | EIGKATAKYFFYSNIMNFFKTEITLANGEIRKRPLIETNGETGEIVWDKGRDFAT | SEQ ID NO: |
| | VRKVLSMPQVNIVKKTEVQTGGFSKESILPKRNSDKLIARKKDWDPKKYGGFDSP | 172 |
| | TVAYSVLVVAKVEKGKSKKLKSVKELLGITIMERSSFEKNPIDFLEAKGYKEVKK | |
| | DLIIKLPKYSLFELENGRKRMLASAGELQKGNELALPSKYVNFLYLASHYEKLKG | |
| | SPEDNEQKQLFVEQHKHYLDEIIEQISEFSKRVILADANLDKVLSAYNKHRDKPI | |
| | REQAENIIHLFTLTNLGAPAAFKYFDTTIDRKRYTSTKEVLDATLIHQSITGLYE | |
| | TRIDLSQLGGDGGSGGSGGSGGSGGSGGSGGMDKKYSIGLAIGTNSVGWAVITDE | |
| | YKVPSKKFKVLGNTDRHSIKKNLIGALLFDSGETAEATRLKRTARRRYTRRKNRI | |
| | CYLQEIFSNEMAKVDDSFFHRLEESFLVEEDKKHERHPIFGNIVDEVAYHEKYPT | |
| | IYHLRKKLVDSTDKADLRLIYLALAHMIKFRGHFLIEGDLNPDNSDVDKLFIQLV | |
| | QTYNQLFEENPINASGVDAKAILSARLSKSRRLENLIAQLPGEKKNGLFGNLIAL | |
| | SLGLTPNFKSNFDLAEDAKLQLSKDTYDDDLDNLLAQIGDQYADLFLAAKNLSDA | |
| | ILLSDILRVNTEITKAPLSASMIKRYDEHHQDLTLLKALVRQQLPEKYKEIFFDQ | |
| | SKNGYAGYIDGGASQEEFYKFIKPILEKMDGTEELLVKLNREDLLRKQRTFDNGS | |
| | IPHQIHLGELHAILRRQEDFYPFLKDNREKIEKILTFRIPYYVGPLARGNSRFAW | |
| | MTRKSEETITPWNFEEVVDKGASAQSFIERMTNFDKNLPNEKVLPKHSLLYEYFT | |
| | VYNELTKVKYVTEGMRKPAFLSGEQKKAIVDLLFKTNRKVTVKQLKEDYFKKIEC | |
| | FDSVEISGVEDRFNASLGTYHDLLKIIKDKDFLDNEENEDILEDIVLTLTLFEDR | |
| | EMIEERLKTYAHLFDDKVMKQLKRRRYTGWGRLSRKLINGIRDKQSGKTILDFLK | |
| | SDGFANRNFMQLIHDDSLTFKEDIQKAQVSGQGDSLHEHIANLAGSPAIKKGILQ | |
| | TVKVVDELVKVMGRHKPENIVIEMARENQTTQKGQKNSRERMKRIEEGIKELGSQ | |
| | ILKEHPVENTQLQNEKLYLYYLQNGRDMYVDQELDINRLSDYDVDHIVPQSFLKD | |
| | DSIDNKVLTRSDKNRGKSDNVPSEEVVKKMKNYWRQLLNAKLITQRKFDNLTKAE | |
| | RGGLSELDKAGFIKRQLVETRQITKHVAQILDSRMNTKYDENDKLIREVKVITLK | |
| | SKLVSDFRKDFQFYKVREINNYHHAHDAYLNAVVGTALIKKYPKLESEFVYGDYK | |
| | VYDVRKMIAKSEQ | |
| CP1041 | NIMNFFKTEITLANGEIRKRPLIETNGETGEIVWDKGRDFATVRKVLSMPQVNIV | SEQ ID NO: |
| | KKTEVQTGGFSKESILPKRNSDKLIARKKDWDPKKYGGFDSPTVAYSVLVVAKVE | 173 |
| | KGKSKKLKSVKELLGITIMERSSFEKNPIDFLEAKGYKEVKKDLIIKLPKYSLFE | |
| | LENGRKRMLASAGELQKGNELALPSKYVNFLYLASHYEKLKGSPEDNEQKQLFVE | |
| | QHKHYLDEIIEQISEFSKRVILADANLDKVLSAYNKHRDKPIREQAENIIHLFTL | |
| | TNLGAPAAFKYFDTTIDRKRYTSTKEVLDATLIHQSITGLYETRIDLSQLGGDGG | |
| | SGGSGGSGGSGGSGGSGGDKKYSIGLAIGTNSVGWAVITDEYKVPSKKFKVLGNT | |
| | DRHSIKKNLIGALLFDSGETAEATRLKRTARRRYTRRKNRICYLQEIFSNEMAKV | |
| | DDSFFHRLEESFLVEEDKKHERHPIFGNIVDEVAYHEKYPTIYHLRKKLVDSTDK | |
| | ADLRLIYLALAHMIKFRGHFLIEGDLNPDNSDVDKLFIQLVQTYNQLFEENPINA | |
| | SGVDAKAILSARLSKSRRLENLIAQLPGEKKNGLFGNLIALSLGLTPNFKSNFDL | |
| | AEDAKLQLSKDTYDDDLDNLLAQIGDQYADLFLAAKNLSDAILLSDILRVNTEIT | |
| | KAPLSASMIKRYDEHHQDLTLLKALVRQQLPEKYKEIFFDQSKNGYAGYIDGGAS | |
| | QEEFYKFIKPILEKMDGTEELLVKLNREDLLRKQRTFDNGSIPHQIHLGELHAIL | |
| | RRQEDFYPFLKDNREKIEKILTFRIPYYVGPLARGNSRFAWMTRKSEETITPWNF | |
| | EEVVDKGASAQSFIERMTNFDKNLPNEKVLPKHSLLYEYFTVYNELTKVKYVTEG | |
| | MRKPAFLSGEQKKAIVDLLFKTNRKVTVKQLKEDYFKKIECFDSVEISGVEDRFN | |
| | ASLGTYHDLLKIIKDKDFLDNEENEDILEDIVLTLTLFEDREMIEERLKTYAHLF | |
| | DDKVMKQLKRRRYTGWGRLSRKLINGIRDKQSGKTILDFLKSDGFANRNFMQLIH | |
| | DDSLTFKEDIQKAQVSGQGDSLHEHIANLAGSPAIKKGILQTVKVVDELVKVMGR | |
| | HKPENIVIEMARENQTTQKGQKNSRERMKRIEEGIKELGSQILKEHPVENTQLQN | |
| | EKLYLYYLQNGRDMYVDQELDINRLSDYDVDHIVPQSFLKDDSIDNKVLTRSDKN | |
| | RGKSDNVPSEEVVKKMKNYWRQLLNAKLITQRKFDNLTKAERGGLSELDKAGFIK | |
| | RQLVETRQITKHVAQILDSRMNTKYDENDKLIREVKVITLKSKLVSDFRKDFQFY | |
| | KVREINNYHHAHDAYLNAVVGTALIKKYPKLESEFVYGDYKVYDVRKMIAKSEQE | |
| | IGKATAKYFFYS | |
| CP1249 | PEDNEQKQLFVEQHKHYLDEIIEQISEFSKRVILADANLDKVLSAYNKHRDKPIR | SEQ ID NO: |
| | EQAENIIHLFTLTNLGAPAAFKYFDTTIDRKRYTSTKEVLDATLIHQSITGLYET | 174 |
| | RIDLSQLGGDGGSGGSGGSGGSGGSGGSGGMDKKYSIGLAIGTNSVGWAVITDEY | |
| | KVPSKKFKVLGNTDRHSIKKNLIGALLFDSGETAEATRLKRTARRRYTRRKNRIC | |
| | YLQEIFSNEMAKVDDSFFHRLEESFLVEEDKKHERHPIFGNIVDEVAYHEKYPTI | |
| | YHLRKKLVDSTDKADLRLIYLALAHMIKFRGHFLIEGDLNPDNSDVDKLFIQLVQ | |
| | TYNQLFEENPINASGVDAKAILSARLSKSRRLENLIAQLPGEKKNGLFGNLIALS | |
| | LGLTPNFKSNFDLAEDAKLQLSKDTYDDDLDNLLAQIGDQYADLFLAAKNLSDAI | |
| | LLSDILRVNTEITKAPLSASMIKRYDEHHQDLTLLKALVRQQLPEKYKEIFFDQS | |
| | KNGYAGYIDGGASQEEFYKFIKPILEKMDGTEELLVKLNREDLLRKQRTFDNGSI | |
| | PHQIHLGELHAILRRQEDFYPFLKDNREKIEKILTFRIPYYVGPLARGNSRFAWM | |
| | TRKSEETITPWNFEEVVDKGASAQSFIERMTNFDKNLPNEKVLPKHSLLYEYFTV | |
| | YNELTKVKYVTEGMRKPAFLSGEQKKAIVDLLFKTNRKVTVKQLKEDYFKKIECF | |
| | DSVEISGVEDRFNASLGTYHDLLKIIKDKDFLDNEENEDILEDIVLTLTLFEDRE | |
| | MIEERLKTYAHLFDDKVMKQLKRRRYTGWGRLSRKLINGIRDKQSGKTILDFLKS | |
| | DGFANRNFMQLIHDDSLTFKEDIQKAQVSGQGDSLHEHIANLAGSPAIKKGILQT | |
| | VKVVDELVKVMGRHKPENIVIEMARENQTTQKGQKNSRERMKRIEEGIKELGSQI | |
| | LKEHPVENTQLQNEKLYLYYLQNGRDMYVDQELDINRLSDYDVDHIVPQSFLKDD | |
| | SIDNKVLTRSDKNRGKSDNVPSEEVVKKMKNYWRQLLNAKLITQRKFDNLTKAER | |
| | GGLSELDKAGFIKRQLVETRQITKHVAQILDSRMNTKYDENDKLIREVKVITLKS | |
| | KLVSDFRKDFQFYKVREINNYHHAHDAYLNAVVGTALIKKYPKLESEFVYGDYKV | |
| | YDVRKMIAKSEQEIGKATAKYFFYSNIMNFFKTEITLANGEIRKRPLIETNGETG | |
| | EIVWDKGRDFATVRKVLSMPQVNIVKKTEVQTGGFSKESILPKRNSDKLIARKKD | |
| | WDPKKYGGFDSPTVAYSVLVVAKVEKGKSKKLKSVKELLGITIMERSSFEKNPID | |
| | FLEAKGYKEVKKDLIIKLPKYSLFELENGRKRMLASAGELQKGNELALPSKYVNF | |
| | LYLASHYEKLKGS | |
| CP1300 | KPIREQAENIIHLFTLTNLGAPAAFKYFDTTIDRKRYTSTKEVLDATLIHQSITG | SEQ ID NO: |
| | LYETRIDLSQLGGDGGSGGSGGSGGSGGSGGSGGDKKYSIGLAIGTNSVGWAVIT | 175 |
| | DEYKVPSKKFKVLGNTDRHSIKKNLIGALLFDSGETAEATRLKRTARRRYTRRKN | |
| | RICYLQEIFSNEMAKVDDSFFHRLEESFLVEEDKKHERHPIFGNIVDEVAYHEKY | |
| | PTIYHLRKKLVDSTDKADLRLIYLALAHMIKFRGHFLIEGDLNPDNSDVDKLFIQ | |
| | LVQTYNQLFEENPINASGVDAKAILSARLSKSRRLENLIAQLPGEKKNGLFGNLI | |
| | ALSLGLTPNFKSNFDLAEDAKLQLSKDTYDDDLDNLLAQIGDQYADLFLAAKNLS | |
| | DAILLSDILRVNTEITKAPLSASMIKRYDEHHQDLTLLKALVRQQLPEKYKEIFF | |
| | DQSKNGYAGYIDGGASQEEFYKFIKPILEKMDGTEELLVKLNREDLLRKQRTFDN | |
| | GSIPHQIHLGELHAILRRQEDFYPFLKDNREKIEKILTFRIPYYVGPLARGNSRF | |
| | AWMTRKSEETITPWNFEEVVDKGASAQSFIERMTNFDKNLPNEKVLPKHSLLYEY | |
| | FTVYNELTKVKYVTEGMRKPAFLSGEQKKAIVDLLFKTNRKVTVKQLKEDYFKKI | |
| | ECFDSVEISGVEDRFNASLGTYHDLLKIIKDKDFLDNEENEDILEDIVLTLTLFE | |
| | DREMIEERLKTYAHLFDDKVMKQLKRRRYTGWGRLSRKLINGIRDKQSGKTILDF | |
| | LKSDGFANRNFMQLIHDDSLTFKEDIQKAQVSGQGDSLHEHIANLAGSPAIKKGI | |
| | LQTVKVVDELVKVMGRHKPENIVIEMARENQTTQKGQKNSRERMKRIEEGIKELG | |
| | SQILKEHPVENTQLQNEKLYLYYLQNGRDMYVDQELDINRLSDYDVDHIVPQSFL | |
| | KDDSIDNKVLTRSDKNRGKSDNVPSEEVVKKMKNYWRQLLNAKLITQRKFDNLTK | |
| | AERGGLSELDKAGFIKRQLVETRQITKHVAQILDSRMNTKYDENDKLIREVKVIT | |
| | LKSKLVSDFRKDFQFYKVREINNYHHAHDAYLNAVVGTALIKKYPKLESEFVYGD | |
| | YKVYDVRKMIAKSEQEIGKATAKYFFYSNIMNFFKTEITLANGEIRKRPLIETNG | |
| | ETGEIVWDKGRDFATVRKVLSMPQVNIVKKTEVQTGGFSKESILPKRNSDKLIAR | |
| | KKDWDPKKYGGFDSPTVAYSVLVVAKVEKGKSKKLKSVKELLGITIMERSSFEKN | |
| | PIDFLEAKGYKEVKKDLIIKLPKYSLFELENGRKRMLASAGELQKGNELALPSKY | |
| | VNFLYLASHYEKLKGSPEDNEQKQLFVEQHKHYLDEIIEQISEFSKRVILADANL | |
| | DKVLSAYNKHRD | |

[0236] The Cas9 circular permutants that may be useful in the base editing constructs described herein. Exemplary C-terminal fragments of Cas9, based on the Cas9 of SEQ ID NO: 74, which may be rearranged to an N-terminus of Cas9, are provided below. It should be appreciated that such C-terminal fragments of Cas9 are exemplary and are not meant to be limiting. These exemplary CP-Cas9 fragments have the following sequences:

| CP name | Sequence | SEQ ID NO: |
|---|---|---|
| CP1012 c- | DYKVYDVRKMIAKSEQEIGKATAKY | SEQ ID NO: |
| terminal | FFYSNIMNFFKTEITLANGEIRKRP | 176 |
| fragment | LIETNGETGEIVWDKGRDFATVRKV | |
| | LSMPQVNIVKKTEVQTGGFSKESIL | |
| | PKRNSDKLIARKKDWDPKKYGGFDS | |
| | PTVAYSVLVVAKVEKGKSKKLKSVK | |
| | ELLGITIMERSSFEKNPIDFLEAKG | |
| | YKEVKKDLIIKLPKYSLFELENGRK | |
| | RMLASAGELQKGNELALPSKYVNFL | |
| | YLASHYEKLKGSPEDNEQKQLFVEQ | |
| | HKHYLDEIIEQISEFSKRVILADAN | |
| | LDKVLSAYNKHRDKPIREQAENIIH | |
| | LFTLTNLGAPAAFKYFDTTIDRKRY | |
| | TSTKEVLDATLIHQSITGLYETRID | |
| | LSQLGGD | |
| CP1028 c- | EIGKATAKYFFYSNIMNFFKTEITL | SEQ ID NO: |
| terminal | ANGEIRKRPLIETNGETGEIVWDKG | 177 |
| fragment | RDFATVRKVLSMPQVNIVKKTEVQT | |
| | GGFSKESILPKRNSDKLIARKKDWD | |
| | PKKYGGFDSPTVAYSVLVVAKVEKG | |
| | KSKKLKSVKELLGITIMERSSFEKN | |
| | PIDFLEAKGYKEVKKDLIIKLPKYS | |
| | LFELENGRKRMLASAGELQKGNELA | |
| | LPSKYVNFLYLASHYEKLKGSPEDN | |
| | EQKQLFVEQHKHYLDEIIEQISEFS | |
| | KRVILADANLDKVLSAYNKHRDKPI | |
| | REQAENIIHLFTLTNLGAPAAFKYF | |
| | DTTIDRKRYTSTKEVLDATLIHQSI | |
| | TGLYETRIDLSQLGGD | |
| CP1041 c- | NIMNFFKTEITLANGEIRKRPLIET | SEQ ID NO: |
| terminal | NGETGEIVWDKGRDFATVRKVLSMP | 178 |
| fragment | QVNIVKKTEVQTGGFSKESILPKRN | |
| | SDKLIARKKDWDPKKYGGFDSPTVA | |
| | YSVLWAKVEKGKSKKLKSVKELLGI | |
| | TIMERSSFEKNPIDFLEAKGYKEVK | |
| | KDLIIKLPKYSLFELENGRKRMLAS | |
| | AGELQKGNELALPSKYVNFLYLASH | |
| | YEKLKGSPEDNEQKQLFVEQHKHYL | |
| | DEIIEQISEFSKRVILADANLDKVL | |
| | SAYNKHRDKPIREQAENIIHLFTLT | |
| | NLGAPAAFKYFDTTIDRKRYTSTKE | |
| | VLDATLIHQSITGLYETRIDLSQLG | |
| | GD | |
| CP1249 c- | PEDNEQKQLFVEQHKHYLDEIIEQI | SEQ ID NO: |
| terminal | SEFSKRVILADANLDKVLSAYNKHR | 179 |
| fragment | DKPIREQAENIIHLFTLTNLGAPAA | |
| | FKYFDTTIDRKRYTSTKEVLDATLI | |
| | HQSITGLYETRIDLSQLGGD | |
| CP1300 c- | KPIREQAENIIHLFTLTNLGAPAAF | SEQ ID NO: |
| terminal | KYFDTTIDRKRYTSTKEVLDATLIH | 180 |
| fragment | QSITGLYETRIDLSQLGGD | |

[0237] In some embodiments, the napDNAbp domain comprises a combination of more than one Cas homolog or variant, such as a circularly permuted Cas variant. In some embodiments, the napDNAbp domain comprises a first Cas variant and a second Cas variant. In some embodiments, the napDNAbp domain comprises a first Cas variant comprising a Cas9-NG and a second Cas variant comprising a Cas9-CP1041 variant. The combination of the CP1041 variant and the NG variant enables both broadened PAM targeting and an expanded editing window. Such a domain is referred to herein as “SpCas9-NG-CP1041.” In some embodiments, the napDNAbp domain comprises an amino acid sequence that has at least 80%, at least 8%, at least 90%, at least 92.5%, at least 95%, at least 97.5%, at least 98%, or at least 99% sequence identity to SEQ ID NO: 181. In some embodiments, the napDNAbp domain comprises the sequence of SEQ ID NO: 181

(SEQ ID NO: 181)
NIMNFFKTEITLANGEIRKRPLIETNGETGEIVWD
KGRDFATVRKVLSMPQVNIVKKTEVQTGGFSKESI
RPKRNSDKLIARKKDWDPKKYGGFVSPTVAYSVLV
VAKVEKGKSKKLKSVKELLGITIMERSSFEKNPID
FLEAKGYKEVKKDLIIKLPKYSLFELENGRKRMLA
SARFLQKGNELALPSKYVNFLYLASHYEKLKGSPE
DNEQKQLFVEQHKHYLDEIIEQISEFSKRVILADA
NLDKVLSAYNKHRDKPIREQAENIIHLFTLTNLGA
PRAFKYFDTTIDRKVYRSTKEVLDATLIHQSITGL
YETRIDLSQLGGDGGSGGSGGSGGSGGSGGSGGDK
KYSIGLAIGTNSVGWAVITDEYKVPSKKFKVLGNT
DRHSIKKNLIGALLFDSGETAEATRLKRTARRRYT
RRKNRICYLQEIFSNEMAKVDDSFFHRLEESFLVE
EDKKHERHPIFGNIVDEVAYHEKYPTIYHLRKKLV
DSTDKADLRLIYLALAHMIKFRGHFLIEGDLNPDN
SDVDKLFIQLVQTYNQLFEENPINASGVDAKAILS
ARLSKSRRLENLIAQLPGEKKNGLFGNLIALSLGL
TPNFKSNFDLAEDAKLQLSKDTYDDDLDNLLAQIG
DQYADLFLAAKNLSDAILLSDILRVNTEITKAPLS
ASMIKRYDEHHQDLTLLKALVRQQLPEKYKEIFFD
QSKNGYAGYIDGGASQEEFYKFIKPILEKMDGTEE
LLVKLNREDLLRKQRTFDNGSIPHQIHLGELHAIL
RRQEDFYPFLKDNREKIEKILTFRIPYYVGPLARG
NSRFAWMTRKSEETITPWNFEEVVDKGASAQSFIE
RMTNFDKNLPNEKVLPKHSLLYEYFTVYNELTKVK
YVTEGMRKPAFLSGEQKKAIVDLLFKTNRKVTVKQ
LKEDYFKKIECFDSVEISGVEDRFNASLGTYHDLL
KIIKDKDFLDNEENEDILEDIVLTLTLFEDREMIE
ERLKTYAHLFDDKVMKQLKRRRYTGWGRLSRKLIN
GIRDKQSGKTILDFLKSDGFANRNFMQLIHDDSLT
FKEDIQKAQVSGQGDSLHEHIANLAGSPAIKKGIL
QTVKVVDELVKVMGRHKPENIVIEMARENQTTQKG
QKNSRERMKRIEEGIKELGSQILKEHPVENTQLQN
EKLYLYYLQNGRDMYVDQELDINRLSDYDVDHIVP
QSFLKDDSIDNKVLTRSDKNRGKSDNVPSEEVVKK
MKNYWRQLLNAKLITQRKFDNLTKAERGGLSELDK
AGFIKRQLVETRQITKHVAQILDSRMNTKYDENDK
LIREVKVITLKSKLVSDFRKDFQFYKVREINNYHH
AHDAYLNAVVGTALIKKYPKLESEFVYGDYKVYDV
RKMIAKSEQEIGKATAKYFFYS

[0238] In some embodiments, the napDNAbp domain comprises a first Cas variant comprising a Cas9-VRQR and a second Cas variant comprising a Cas9-CP1041 variant. Such a domain is referred to herein as “SpCas9-NG-VRQR.” In some embodiments, the napDNAbp domain comprises an amino acid sequence that has at least 80%, at least 8%, at least 90%, at least 92.5%, at least 95%, at least 97.5%, at least 98%, or at least 99% sequence identity to SEQ ID NO: 182. In some embodiments, the napDNAbp domain comprises the sequence of SEQ ID NO: 182.

(SEQ ID NO: 182)
NIMNFFKTEITLANGEIRKRPLIETNGETGEIVWD
KGRDFATVRKVLSMPQVNIVKKTEVQTGGFSKESI
RPKRNSDKLIARKKDWDPKKYGGFVSPTVAYSVLV
VAKVEKGKSKKLKSVKELLGITIMERSSFEKNPID
FLEAKGYKEVKKDLIIKLPKYSLFELENGRKRMLA
SARFLQKGNELALPSKYVNFLYLASHYEKLKGSPE
DNEQKQLFVEQHKHYLDEIIEQISEFSKRVILADA
NLDKVLSAYNKHRDKPIREQAENIIHLFTLTNLGA
PRAFKYFDTTIDRKVYRSTKEVLDATLIHQSITGL
YETRIDLSQLGGDGGSGGSGGSGGSGGSGGSGGDK
KYSIGLAIGTNSVGWAVITDEYKVPSKKFKVLGNT
DRHSIKKNLIGALLFDSGETAEATRLKRTARRRYT
RRKNRICYLQEIFSNEMAKVDDSFFHRLEESFLVE
EDKKHERHPIFGNIVDEVAYHEKYPTIYHLRKKLV
DSTDKADLRLIYLALAHMIKFRGHFLIEGDLNPDN
SDVDKLFIQLVQTYNQLFEENPINASGVDAKAILS
ARLSKSRRLENLIAQLPGEKKNGLFGNLIALSLGL
TPNFKSNFDLAEDAKLQLSKDTYDDDLDNLLAQIG
DQYADLFLAAKNLSDAILLSDILRVNTEITKAPLS
ASMIKRYDEHHQDLTLLKALVRQQLPEKYKEIFFD
QSKNGYAGYIDGGASQEEFYKFIKPILEKMDGTEE
LLVKLNREDLLRKQRTFDNGSIPHQIHLGELHAIL
RRQEDFYPFLKDNREKIEKILTFRIPYYVGPLARG
NSRFAWMTRKSEETITPWNFEEVVDKGASAQSFIE
RMTNFDKNLPNEKVLPKHSLLYEYFTVYNELTKVK
YVTEGMRKPAFLSGEQKKAIVDLLFKTNRKVTVKQ
LKEDYFKKIECFDSVEISGVEDRFNASLGTYHDLL
KIIKDKDFLDNEENEDILEDIVLTLTLFEDREMIE
ERLKTYAHLFDDKVMKQLKRRRYTGWGRLSRKLIN
GIRDKQSGKTILDFLKSDGFANRNFMQLIHDDSLT
FKEDIQKAQVSGQGDSLHEHIANLAGSPAIKKGIL
QTVKVVDELVKVMGRHKPENIVIEMARENQTTQKG
QKNSRERMKRIEEGIKELGSQILKEHPVENTQLQN
EKLYLYYLQNGRDMYVDQELDINRLSDYDVDHIVP
QSFLKDDSIDNKVLTRSDKNRGKSDNVPSEEVVKK
MKNYWRQLLNAKLITQRKFDNLTKAERGGLSELDK
AGFIKRQLVETRQITKHVAQILDSRMNTKYDENDK
LIREVKVITLKSKLVSDFRKDFQFYKVREINNYHH
AHDAYLNAVVGTALIKKYPKLESEFVYGDYKVYDV
RKMIAKSEQEIGKATAKYFFYS

[0239] Any of the references noted above which relate to Cas9 or Cas9 equivalents are hereby incorporated by reference in their entireties, if not already stated so.

### Adenosine Deaminase Domains

[0240] The disclosure provides base editors that comprise an adenosine deaminase domain. In some aspects, any of the disclosed base editors are capable of deaminating adenosine in a nucleic acid sequence (e.g., DNA). As one example, any of the base editors described herein may be base editors (e.g., adenine base editors). In some embodiments, the disclosed adenosine deaminases comprise known adenosine deaminase TadA7.10, or comprise variants of TadA7.10, which comprises the following mutations as compared to wild-type ecTadA (SEQ ID NO: 325): W23R, H36L, P48A, R51L, L84F, A106V, D108N, H123Y, S146C, D147Y, R152P, E155V, I156F, and K157N. In some embodiments, the adenosine deaminase comprises A109S, T111R, D119N, H122N, Y147D, F149Y, T1661, and D167N mutations in TadA7.10. This adenosine deaminase variant is referred to herein as TadA-8e, or TadA8.

[0241] In various embodiments, the adenosine deaminases of the disclosed base editors hydrolytically deaminate a targeted adenosine in a nucleic acid of interest to an inosine, which is read as a guanosine (G) by DNA polymerase enzymes.

[0242] In some embodiments, the adenosine deaminase domain of any of the disclosed base editors comprises a single adenosine deaminase, or a monomer. In some embodiments, the adenosine deaminase domain comprises 2, 3, 4 or 5 adenosine deaminases. In some embodiments, the adenosine deaminase domain comprises two adenosine deaminases, or a dimer. In some embodiments, the deaminase domain comprises a dimer of an engineered (or evolved) deaminase and a wild-type deaminase, such as a wild-type E. coli deaminase. One of skill in the art will be able to identify the corresponding residue in any homologous protein and in the respective encoding nucleic acid by methods well known in the art, e.g., by sequence alignment and determination of homologous residues. Accordingly, one of skill in the art would be able to generate mutations in any naturally-occurring adenosine deaminase (e.g., having homology to ecTadA) that corresponds to any of the mutations described herein, e.g., any of the mutations identified in ecTadA. In some embodiments, the adenosine deaminase is from a prokaryote. In some embodiments, the adenosine deaminase is from a bacterium. In some embodiments, the adenosine deaminase is from Escherichia coli, Staphylococcus aureus, Streptococcus pyogenes, Salmonella typhi, Shewanella putrefaciens, Haemophilus influenzae, Caulobacter crescentus, or Bacillus subtilis. In some embodiments, the adenosine deaminase is from E. coli. It should be appreciated that the mutations provided herein (e.g., mutations in ecTadA) may be applied to adenosine deaminases in other adenosine base editors, for example, those provided in International Publication No. WO 2018/027078, published Aug. 2, 2018; International Publication No. WO 2019/079347 on Apr. 25, 2019; International Application No PCT/US2019/033848, filed May 23, 2019, which published as International Publication No. WO 2019/226593 on Nov. 28, 2019; U.S. Patent Publication No. 2018/0073012, published Mar. 15, 2018, which issued as U.S. Pat. No. 10,113,163, on Oct. 30, 2018; U.S. Patent Publication No. 2017/0121693, published May 4, 2017, which issued as U.S. Pat. No. 10,167,457 on Jan. 1, 2019; International Publication No. WO 2017/070633, published Apr. 27, 2017; U.S. Patent Publication No. 2015/0166980, published Jun. 18, 2015; U.S. Pat. No. 9,840,699, issued Dec. 12, 2017; and U.S. Pat. No. 10,077,453, issued Sep. 18, 2018, and U.S. Provisional Application No. 62/835,490, filed Apr. 17, 2019, International Publication No. WO 2020/214842, published Oct. 22, 2020, International Publication No. WO2020/236982, published Nov. 26, 2020. and International Application No. PCT/US2021/016827, filed Feb. 5, 2021; all of which are incorporated herein by reference in their entireties.

[0243] Additional exemplary adenosine deaminases for use in the editing methods provided herein include TadA mutants TadA*8.1, TadA*8.2, TadA*8.3, TadA*8.4, TadA*8.5, TadA*8.6, TadA*8.7, TadA*8.8, TadA*8.9, TadA*8 10, TadA*8.11, TadA*8.12, TadA*8.13, TadA*8 14, TadA*8.15, TadA*8.16, TadA*8.17, TadA*8 18, TadA*8 19, TadA*8.20, TadA*8.21, TadA*8 22, TadA*8.23, and TadA*8.24. See WO 2020/231863, published Nov. 19, 2020, incorporated herein by reference.

[0244] In some embodiments, the adenosine deaminase is at least 50%, at least 55%, at least 60%, at least 65%, at least 70%, at least 75% at least 80%, at least 85%, at least 90%, at least 95%, at least 96%, at least 97%, at least 98%, at least 99%, or at least 99.5% identical to a naturally-occurring adenosine deaminase. In some embodiments, the adenosine deaminase is from a bacterium, such as, E.coli, S. aureus, S. pyogenes S. typhi, S. putrefaciens, H. influenzae, or C. crescentus. In some embodiments, the adenosine deaminase is a TadA deaminase. In some embodiments, the TadA deaminase is an E. coli TadA deaminase (ecTadA). In some embodiments, the TadA deaminase is a truncated E. coli TadA deaminase. For example, the truncated ecTadA may be missing one or more N-terminal amino acids relative to a full-length ecTadA. In some embodiments, the truncated ecTadA may be missing 1, 2, 3, 4, 5 ,6, 7, 8, 9, 10, 11, 12, 13, 14, 15, 6, 17, 18, 19, or 20 N-terminal amino acid residues relative to the full length ecTadA. In some embodiments, the truncated ecTadA may be missing 1, 2, 3, 4, 5, 6, 7, 8, 9, 10, 11, 12, 13, 14, 15, 6, 17, 18, 19, or 20 C-terminal amino acid residues relative to the full length ecTadA. In some embodiments, the ecTadA deaminase does not comprise an N-terminal methionine

[0245] In some embodiments, the TadA deaminase is an N-terminal truncated TadA. In certain embodiments, the adenosine deaminase comprises the amino acid sequence:

(SEQ ID NO: 278)
MSEVEFSHEYWMRHALTLAKRAWDEREVPVGAVLV
HNNRVIGEGWNRPIGRHDPTAHAEIMALRQGGLVM
QNYRLIDATLYVTLEPCVMCAGAMIHSRIGRVVFG
ARDAKTGAAGSLMDVLHHPGMNHRVEITEGILADE
CAALLSDFFRMRRQEIKAQKKAQSSTD.

[0246] In some embodiments the TadA deaminase is a full-length E. coli TadA deaminase. For example, in certain embodiments, the adenosine deaminase comprises the amino acid sequence:

(SEQ ID NO: 279)
MRRAFITGVFFLSEVEFSHEYWMRHALTLAKRAWD
EREVPVGAVLVHNNRVIGEGWNRPIGRHDPTAHAE
IMALRQGGLVMQNYRLIDATLYVTLEPCVMCAGAM
IHSRIGRWFGARDAKTGAAGSLMDVLHHPGMNHRV
EITEGILADECAALLSDFFRMRRQEIKAQKKAQSS
TD

[0247] It should be appreciated, however, that additional adenosine deaminases useful in the present application would be apparent to the skilled artisan and are within the scope of this disclosure. For example, the adenosine deaminase may be a homolog of an ADAT. Exemplary ADAT homologs include, without limitation:

Staphylococcus aureus
TadA:
(SEQ ID NO: 280)
MGSHMTNDIYFMTLAIEEAKKAAQLGEVPIGAIIT
KDDEVIARAHNLRETLQQPTAHAEHIAIERAAKVL
GSWRLEGCTLYVTLEPCVMCAGTIVMSRIPRVVYG
ADDPKGGCSGSLMNLLQQSNFNHRAIVDKGVLKEA
CSTLLTTFFKNLRANKKSTN
Bacillus subtilis
TadA:
(SEQ ID NO: 281)
MTQDELYMKEAIKEAKKAEEKGEVPIGAVLVINGE
IIARAHNLRETEQRSIAHAEMLVIDEACKALGTWR
LEGATLYVTLEPCPMCAGAVVLSRVEKVVFGAFDP
KGGCSGTLMNLLQEERFNHQAEVVSGVLEEECGGM
LSAFFRELRKKKKAARKNLSE
Salmonella typhimurium (S. typhimurium)
TadA:
(SEQ ID NO: 282)
MPPAFITGVTSLSDVELDHEYWMRHALTLAKRAWD
EREVPVGAVLVHNHRVIGEGWNRPIGRHDPTAHAE
IMALRQGGLVLQNYRLLDTTLYVTLEPCVMCAGAM
VHSRIGRVVFGARDAKTGAAGSLIDVLHHPGMNHR
VEIIEGVLRDECATLLSDFFRMRRQEIKALKKADR
AEGAGPAV
Shewanella putrefaciens (S. putrefaciens)
TadA:
(SEQ ID NO: 283)
MDEYWMQVAMQMAEKAEAAGEVPVGAVLVKDGQQI
ATGYNLSISQHDPTAHAEILCLRSAGKKLENYRLL
DATLYITLEPCAMCAGAMVHSRIARVVYGARDEKT
GAAGTVVNLLQHPAFNHQVEVTSGVLAEACSAQLS
RFFKRRRDEKKALKLAQRAQQGIE
Haemophilus influenzae F3031 (H. influenzae)
TadA:
(SEQ ID NO: 284)
MDAAKVRSEFDEKMMRYALELADKAEALGEIPVGA
VLVDDARNIIGEGWNLSIVQSDPTAHAEIIALRNG
AKNIQNYRLLNSTLYVTLEPCTMCAGAILHSRIKR
LVFGASDYKTGAIGSRFHFFDDYKMNHTLEITSGV
LAEECSQKLSTFFQKRREEKKIEKALLKSLSDK
Caulobacter crescentus (C. crescentus)
TadA:
(SEQ ID NO: 285)
MRTDESEDQDHRMMRLALDAARAAAEAGETPVGAV
ILDPSTGEVIATAGNGPIAAHDPTAHAEIAAMRAA
AAKLGNYRLTDLTLVVTLEPCAMCAGAISHARIGR
VVFGADDPKGGAVVHGPKFFAQPTCHWRPEVTGGV
LADESADLLRGFFRARRKAKI
Geobacter sulfurreducens (G. sulfurreducens)
TadA:
(SEQ ID NO: 286)
MSSLKKTPIRDDAYWMGKAIREAAKAAARDEVPIG
AVIVRDGAVIGRGHNLREGSNDPSAHAEMIAIRQA
ARRSANWRLTGATLYVTLEPCLMCMGAIILARLER
VVFGCYDPKGGAAGSLYDLSADPRLNHQVRLSPGV
CQEECGTMLSDFFRDLRRRKKAKATPALFIDERKV
PPEP
Streptococcus pyogenes (S. pyogenes) TadA
(SEQ ID NO: 287)
MPYSLEEQTYFMQEALKEAEKSLQKAEIPIGCVIV
KDGEIIGRGHNAREESNQAIMHAEIMAINEANAHE
GNWRLLDTTLFVTIEPCVMCSGAIGLARIPHVIYG
ASNQKFGGADSLYQILTDERLNHRVQVERGLLAAD
CANIMQTFFRQGRERKKIAKHLIKEQSDPFD

[0248] Exemplary TadA deaminase domains of the presently disclosed base editors include, without limitation, any of the following adenosein deaminases:

TadA7.10:
(SEQ ID NO: 288)
SEVEFSHEYWMRHALTLAKRALDEREVPVGAVLVL
NNRVIGEGWNRAIGLHDPTAHAEIMALRQGGLVMQ
NYRLIDATLYVTFEPCVMCAGAMIHSRIGRVVFGV
RNAKTGAAGSLMDVLHYPGMNHRVEITEGILADEC
AALLCYFFRMPRQVFNAQKKAQSSTD
TadA 7.10 (V106W) (E. coli)
(SEQ ID NO: 289)
SEVEFSHEYWMRHALTLAK
RARDEREVPVGAVLVLNNRVIGEGWNRAIGLHDPT
AHAEIMALRQGGLVMQNYRLIDATLYVTFEPCVMC
AGAMIHSRIGRVVFGWRNAKTGAAGSLMDVLHYPG
MNHRVEITEGILADECAALLCYFFRMPRQVFNAQK
KAQSSTD
TadA-8e (E. coli)
(SEQ ID NO: 290)
SEVEFSHEYWMRHALTLAKRARDEREVPVGAVLVL
NNRVIGEGWNRAIGLHDPTAHAEIMALRQGGLVMQ
NYRLIDATLYVTFEPCVMCAGAMIHSRIGRVVFGV
RNSKRGAAGSLMNVLNYPGMNHRVEITEGILADEC
AALLCDFYRMPRQVFNAQKKAQSSIN
TadA-8e(V106W) (E. coli)
(SEQ ID NO: 291)
SEVEFSHEYWMRHALTLAKRARDEREVPVGAVLVL
NNRVIGEGWNRAIGLHDPTAHAEIMALRQGGLVMQ
NYRLIDATLYVTFEPCVMCAGAMIHSRIGRVVFGW
RNSKRGAAGSLMNVLNYPGMNHRVEITEGILADEC
AALLCDFYRMPRQVFNAQKKAQSSIN

[0249] In some embodiments, the TadA 7.10 of SEQ ID NO: 2780 comprises an N-terminal methionine. It should be appreciated that the amino acid numbering scheme relating to the mutations in TadA 7.10 may be based on the TadA sequence of SEQ ID NO: 278, which contains an N-terminal methionine.

[0250] In some embodiments, the adenosine deaminase comprises an amino acid sequence that is at least 60%, at least 65%, at least 70%, at least 75%, at least 80%, at least 85%, at least 90%, at least 95%, at least 96%, at least 97%, at least 98%, at least 99%, or at least 99.5% identical to any one of the amino acid sequences set forth in any one of SEQ ID NOs: 278-291, or to any of the adenosine deaminases described herein. It should be appreciated that adenosine deaminases described herein may include one or more mutations (e.g., any of the mutations provided herein). The disclosure provides any deaminase domains with a certain percent identity plus any of the mutations or combinations thereof described herein. In some embodiments, the adenosine deaminase comprises an amino acid sequence that has 1, 2, 3, 4, 5, 6, 7, 8, 9, 10, 11, 12, 13, 14, 15, 16, 17, 18, 19, 20, 21, 22, 21, 24, 25, 26, 27, 28, 29, 30, 31, 32, 33, 34, 35, 36, 37, 38, 39, 40, 41, 42, 43, 44, 45, 46, 47, 48, 49, 50, or more amino acids that differ relative to any one of the amino acid sequences set forth in SEQ ID NOs: 278-291, or any of the adenosine deaminases described herein. These differences may comprise amino acids that have been inserted, deleted, or substituted relative to the amino acid sequence of any of SEQ ID NOs: 278-291. In some embodiments, any of the adenosine deaminase domains described herein may comprise an amino acid sequence having 1, 2, 3, 4, 5, 6, 7, 8, 9, 10, 11, 12, 13, 14, 15, 16, 17, 18, 19, 20, 25, 30, or more than 30 amino acids that differ relative to the amino acid sequence of a wild type adenosine deaminase (e.g., ecTadA). In some embodiments, the adenosine deaminase domains comprise truncations at the N-terminus or C-terminus relative to a wild-type adenosine deaminase.

[0251] In some embodiments, the adenosine deaminase comprises an amino acid sequence that has at least 5, at least 10, at least 15, at least 20, at least 25, at least 30, at least 35, at least 40, at least 45, at least 50, at least 60, at least 70, at least 80, at least 90, at least 100, at least 110, at least 120, at least 130, at least 140, at least 150, at least 160, or at least 170 identical contiguous amino acid residues as compared to any one of the amino acid sequences set forth in SEQ ID NOs: 278-291, or any of the adenosine deaminases described herein.

[0252] In some embodiments, the adenosine deaminase comprises a D108X mutation in ecTadA SEQ ID NO: 278, or a corresponding mutation in another adenosine deaminase (e.g., SEQ ID NO: 279-291), where X indicates any amino acid other than the corresponding amino acid in the wild-type adenosine deaminase. In some embodiments, the adenosine deaminase comprises a D108G, D108N, D108V, D108A, or D108Y mutation in SEQ ID NO: 278, or a corresponding mutation in another adenosine deaminase (e.g., SEQ ID NO: 279-291). In some embodiments, the adenosine deaminase comprises a D108N mutation in SEQ ID NO: 278, or a corresponding mutation in another adenosine deaminase (e.g., SEQ ID NO: 279-291). It should be appreciated, however, that additional deaminases may similarly be aligned to identify homologous amino acid residues that can be mutated as provided herein.

[0253] In some embodiments, the adenosine deaminase comprises an A106X mutation in ecTadA SEQ ID NO: 278, or a corresponding mutation in another adenosine deaminase (e.g., SEQ ID NO: 279-291), where X indicates any amino acid other than the corresponding amino acid in the wild-type adenosine deaminase. In some embodiments, the adenosine deaminase comprises an A106V mutation in SEQ ID NO: 278, or a corresponding mutation in another adenosine deaminase (e.g., SEQ ID NO: 279-291).

[0254] In some embodiments, the adenosine deaminase comprises a E155X mutation in SEQ ID NO: 278, or a corresponding mutation in another adenosine deaminase (e.g., SEQ ID NO: 279-291), where the presence of X indicates any amino acid other than the corresponding amino acid in the wild-type adenosine deaminase. In some embodiments, the adenosine deaminase comprises a E155D, E155G, or E155V mutation in SEQ ID NO: 278, or a corresponding mutation in another adenosine deaminase (e.g., SEQ ID NO: 279-291). In some embodiments, the adenosine deaminase comprises a E155V mutation in SEQ ID NO: 278, or a corresponding mutation in another adenosine deaminase (e.g., SEQ ID NO: 279-291).

[0255] In some embodiments, the adenosine deaminase comprises a D147X mutation in SEQ ID NO: 278, or a corresponding mutation in another adenosine deaminase (e.g., SEQ ID NO: 279-291), where the presence of X indicates any amino acid other than the corresponding amino acid in the wild-type adenosine deaminase. In some embodiments, the adenosine deaminase comprises a D147Y mutation in SEQ ID NO: 278, or a corresponding mutation in another adenosine deaminase (e.g., SEQ ID NO: 279-291).

[0256] It should be appreciated that any of the mutations provided herein (e.g., based on the ecTadA amino acid sequence of SEQ ID NO: 278) may be introduced into other adenosine deaminases, such as S. aureus TadA (saTadA), or other adenosine deaminases (e.g., bacterial adenosine deaminases). It would be apparent to the skilled artisan how to identify amino acid residues from other adenosine deaminases that are homologous to the mutated residues in ecTadA. Thus, any of the mutations identified in ecTadA may be made in other adenosine deaminases that have homologous amino acid residues. It should also be appreciated that any of the mutations provided herein may be made individually or in any combination in ecTadA or another adenosine deaminase (e.g., SEQ ID NO: 279-291). For example, an adenosine deaminase may contain a D108N, a A106V, a E155V, and/or a D147Y mutation in ecTadA SEQ ID NO: 278, or a corresponding mutation in another adenosine deaminase (e.g., SEQ ID NO: 279-291). In some embodiments, an adenosine deaminase comprises the following group of mutations (groups of mutations are separated by a “;”) in ecTadA SEQ ID NO: 278, or corresponding mutations in another adenosine deaminase (e.g., SEQ ID NO: 279-291): D108N and A106V; D108N and E155V; D108N and D147Y; A106V and E155V; A106V and D147Y; E155V and D147Y; D108N, A106V, and E55V; D108N, A106V, and D147Y; D108N, E55V, and D147Y; A106V, E55V, and D147Y; and D108N, A106V, E55V, and D147Y. It should be appreciated, however, that any combination of corresponding mutations provided herein may be made in an adenosine deaminase (e.g., ecTadA). In some embodiments, an adenosine deaminase comprises one or more of the mutations provided herein, which identifies individual mutations and combinations of mutations made in ecTadA. In some embodiments, an adenosine deaminase comprises any mutation or combination of mutations provided herein.

[0257] In some embodiments, the adenosine deaminase comprises an L84X mutation in ecTadA SEQ ID NO: 278, or a corresponding mutation in another adenosine deaminase (e.g., SEQ ID NO: 279-291), where X indicates any amino acid other than the corresponding amino acid in the wild-type adenosine deaminase. In some embodiments, the adenosine deaminase comprises an L84F mutation in SEQ ID NO: 278, or a corresponding mutation in another adenosine deaminase (e.g., SEQ ID NO: 279-291).

[0258] In some embodiments, the adenosine deaminase comprises an H123X mutation in ecTadA SEQ ID NO: 278, or a corresponding mutation in another adenosine deaminase (e.g., SEQ ID NO: 279-291), where X indicates any amino acid other than the corresponding amino acid in the wild-type adenosine deaminase. In some embodiments, the adenosine deaminase comprises an H123Y mutation in SEQ ID NO: 278, or a corresponding mutation in another adenosine deaminase (e.g., SEQ ID NO: 279-291).

[0259] In some embodiments, the adenosine deaminase comprises an I156X mutation in ecTadA SEQ ID NO: 278, or a corresponding mutation in another adenosine deaminase (e.g., SEQ ID NO: 279-291), where X indicates any amino acid other than the corresponding amino acid in the wild-type adenosine deaminase. In some embodiments, the adenosine deaminase comprises an I156F mutation in SEQ ID NO: 278, or a corresponding mutation in another adenosine deaminase (e.g., SEQ ID NO: 279-291).

[0260] In some embodiments, the adenosine deaminase comprises one, two, three, four, five, six, or seven mutations selected from the group consisting of L84X, A106X, D108X, H123X, D147X, E155X, and I156X in SEQ ID NO: 278, or a corresponding mutation or mutations in another adenosine deaminase (e.g., SEQ ID NO: 279-291), where X indicates the presence of any amino acid other than the corresponding amino acid in the wild-type adenosine deaminase.

[0261] In some embodiments, the adenosine deaminase comprises one, two, three, four, five, six, or seven mutations selected from the group consisting of L84F, A106V, D108N, H123Y, D147Y, E155V, and I156F in SEQ ID NO: 278, or a corresponding mutation or mutations in another adenosine deaminase (e.g., SEQ ID NO: 279-291). In some embodiments, the adenosine deaminase comprises one, two, three, four, five, or six mutations selected from the group consisting of S2A, I49F, A106V, D108N, D147Y, and E155V in SEQ ID NO: 278, or a corresponding mutation or mutations in another adenosine deaminase (e.g., SEQ ID NO: 279-291). In some embodiments, the adenosine deaminase comprises one, two, three, four, or five, mutations selected from the group consisting of H8Y, A106T, D108N, N127S, and K160S in SEQ ID NO: 278, or a corresponding mutation or mutations in another adenosine deaminase (e.g., SEQ ID NO: 279-291).

[0262] In some embodiments, the adenosine deaminase comprises one or more of a W23X, H36X, N37X, P48X, I49X, R51X, N72X, L84X, S97X, A106X, D108X, H123X, G125X, A142X, S146X, D147X, R152X, E155X, I156X, K157X, and/or K161X mutation in SEQ ID NO: 278, or one or more corresponding mutations in another adenosine deaminase (e.g., SEQ ID NO: 279-291), where the presence of X indicates any amino acid other than the corresponding amino acid in the wild-type adenosine deaminase. In some embodiments, the adenosine deaminase comprises one or more of W23L, W23R, H36L, P48S, P48A, R51L, L84F, A106V, D108N, H123Y, A142N, S146C, D147Y, R152P, E155V, I156F, and/or K157N mutation in SEQ ID NO: 278, or one or more corresponding mutations in another adenosine deaminase (e.g., SEQ ID NO: 279-291). In some embodiments, the adenosine deaminase comprises one or more of the mutations provided herein corresponding to SEQ ID NO: 278, or one or more corresponding mutations in another adenosine deaminase (e.g., SEQ ID NO: 279-291).

[0263] In some embodiments, the adenosine deaminase comprises or consists of one or two mutations selected from A106X and D108X in SEQ ID NO: 278, or a corresponding mutation or mutations in another adenosine deaminase (e.g., SEQ ID NO: 279-291), where X indicates the presence of any amino acid other than the corresponding amino acid in the wild-type adenosine deaminase. In some embodiments, the adenosine deaminase comprises or consists of one or two mutations selected from A106V and D108N in SEQ ID NO: 278, or a corresponding mutation or mutations in another adenosine deaminase (e.g., SEQ ID NO: 279-291).

[0264] In some embodiments, the adenosine deaminase comprises or consists of one, two, three, or four mutations selected from A106X, D108X, D147X, and E155X in SEQ ID NO: 278, or a corresponding mutation or mutations in another adenosine deaminase (e.g., SEQ ID NO: 279-291), where X indicates the presence of any amino acid other than the corresponding amino acid in the wild-type adenosine deaminase. In some embodiments, the adenosine deaminase comprises or consists of one, two, three, or four mutations selected from A106V, D108N, D147Y, and E155V in SEQ ID NO: 278, or a corresponding mutation or mutations in another adenosine deaminase (e.g., SEQ ID NO: 279-291). In some embodiments, the adenosine deaminase comprises or consists of an A106V, D108N, D147Y, and E155V mutation in SEQ ID NO: 278, or corresponding mutations in another adenosine deaminase (e.g., SEQ ID NO: 279-291).

[0265] In some embodiments, the adenosine deaminase comprises one or more of the mutations provided herein corresponding to SEQ ID NO: 278, or one or more of the corresponding mutations in another deaminase. In some embodiments, the adenosine deaminase comprises or consists of a variant of SEQ ID NO: 278 provided herein, or the corresponding variant in another adenosine deaminase.

[0266] It should be appreciated that the adenosine deaminase (e.g., a first or second adenosine deaminase) may comprise one or more of the mutations provided in any of the adenosine deaminases (e.g., ecTadA adenosine deaminases) provided herein. In some embodiments, the adenosine deaminase comprises the combination of mutations of any of the adenosine deaminases (e.g., ecTadA adenosine deaminases) provided herein. For example, the adenosine deaminase may comprise the mutations W23R, H36L, P48A, R51L, L84F, A106V, D108N, H123Y, S146C, D147Y, R152P, E155V, I156F, and K157N (relative to SEQ ID NO: 278), which is shown as ABE7.10 provided herein. In some embodiments, the adenosine deaminase may comprise the mutations H36L, R51L, L84F, A106V, D108N, H123Y, S146C, D147Y, E155V, I156F, and K157N (relative to SEQ ID NO: 278).

[0267] In some embodiments, the adenosine deaminase comprises an amino acid sequence that is at least 60%, 65%, 70%, 75%, 80%, 85%, 90%, 95, 98%, 99%, or 99.5% identical to any one of SEQ ID NOs: 278-291, or any of the adenosine deaminases described herein. In some embodiments, the adenosine deaminase comprises an amino acid sequence that has 1, 2, 3, 4, 5, 6, 7, 8, 9, 10, 11, 12, 13, 14, 15, 16, 17, 18, 19, 20, 21, 22, 21, 24, 25, 26, 27, 28, 29, 30, 31, 32, 33, 34, 35, 36, 37, 38, 39, 40, 41, 42, 43, 44, 45, 46, 47, 48, 49, 50 or more mutations compared to any one of the amino acid sequences set forth in SEQ ID NOs: 278-291, or any of the adenosine deaminases described herein. In some embodiments, the adenosine deaminase comprises an amino acid sequence that has at least 5, at least 10, at least 15, at least 20, at least 25, at least 30, at least 35, at least 40, at least 45, at least 50, at least 60, at least 70, at least 80, at least 90, at least 100, at least 110, at least 120, at least 130, at least 140, at least 150, at least 160, or at least 166, identical contiguous amino acid residues as compared to any one of the amino acid sequences set forth in SEQ ID NOs: 278-291, or any of the adenosine deaminases described herein. In some embodiments, the adenosine deaminase comprises the amino acid sequence of any one of SEQ ID NOs: 278-291, or any of the adenosine deaminases described herein. In some embodiments, the adenosine deaminase consists of the amino acid sequence of any one of SEQ ID NOs: 278-291, or any of the adenosine deaminases described herein. The ecTadA sequences provided below are from ecTadA (SEQ ID NO: 278), absent the N-terminal methionine (M). For clarity, the amino acid numbering scheme used to identify the various amino acid mutations is derived from ecTadA (SEQ ID NO: 278) for E. coli TadA.

### Cytidine Deaminase Domains

[0268] In some embodiments, the disclosure provides base editors that comprise one or more cytidine deaminase domains. In some aspects, any of the disclosed base editors are capable of deaminating cytidine in a nucleic acid sequence (e.g., genomic DNA). As one example, any of the base editors described herein may be base editors, (e.g., cytidine base editors).

[0269] In some embodiments, the cytidine deaminase is an apolipoprotein B mRNA-editing complex (APOBEC) family deaminase. In some embodiments, the cytidine deaminase is an APOBEC1 deaminase, an APOBEC2 deaminase, an APOBEC3A deaminase, an APOBEC3B deaminase, an APOBEC3C deaminase, an APOBEC3D deaminase, an APOBEC3F deaminase, an APOBEC3G deaminase, an APOBEC3H deaminase, or an APOBEC4 deaminase. In some embodiments, the cytidine deaminase is an activation-induced deaminase (AID). In some embodiments, the deaminase is a Lamprey CDA1 (pmCDA1) deaminase. In some embodiments, the cytidine deaminase is from a human, chimpanzee, gorilla, monkey, cow, dog, rat, or mouse. In some embodiments, the deaminase is from a human. In some embodiments the deaminase is from a rat. In some embodiments, the cytidine deaminase is a human APOBEC1 deaminase. In some embodiments, the cytidine deaminase is pmCDA1. In some embodiments, the deaminase is human APOBEC3G. In some embodiments, the deaminase is a human APOBEC3G variant. In some embodiments, the deaminase is at least 80%, at least 85%, at least 90%, at least 92%, at least 95%, at least 96%, at least 97%, at least 98%, at least 99%, or at least 99.5% identical to any one of the APOBEC amino acid sequences set forth herein.

[0270] Additional exemplary cytidine deaminases from the APOBEC family include Pongo pygmaeus APOBEC1 (PpAPOBEC1), Rhinopithecus roxellana APOBEC3F (RrA3F), Alligator mississippiensis (AmAPOBEC1), and Sus scrofa APOBEC3B (SsAPOBEC3B), and variants thereof. For example, any one of the cytidine deaminases PpAPOBEC1, PpAPOBEC1 H122A, PpAPOBEC1 R33A, RrA3F, RrA3F F130L, AmAPOBEC1, SsAPOBEC3B, and SsAPOBEC3B R54Q, may be used with the editing methods provided herein. See Gaudelli et al. Nat. Commun. (2020) 11:2052 and International Publication No. WO 2021/041885, published Mar. 4, 2021, each of which is incorporated by reference herein.

[0271] Some exemplary suitable cytidine deaminases domains that can be fused to Cas9 domains according to aspects of this disclosure are provided below. It should be understood that the Specification also embraces other cytidine deaminases comprising an amino acid sequence having at least 80%, at least 85%, at least 90%, at least 95%, at least 98%, at least 99%, or at least 99.5% sequence identity to one of the following exemplary cytidine deaminases:

Human AID:
(SEQ ID NO: 292)
[sequence omitted]
Mouse AID:
(SEQ ID NO: 293)
MDSLLMKQKKFLYHFKNVRWAKGRHETYLCYVVKR
RDSATSCSLDFGHLRNKSGCHVELLFLRYISDWDL
DPGRCYRVTWFTSWSPCYDCARHVAEFLRWNPNLS
LRIFTARLYFCEDRKAEPEGLRRLHRAGVQIGIMT
FKDYFYCWNTFVENRERTFKAWEGLHENSVRLTRQ
LRRILLPLYEVDDLRDAFRMLGF
Dog AID:
(SEQ ID NO: 294)
MDSLLMKQRKFLYHFKNVRWAKGRHETYLCYVVKR
RDSATSFSLDFGHLRNKSGCHVELLFLRYISDWDL
DPGRCYRVTWFTSWSPCYDCARHVADFLRGYPNLS
LRIFAARLYFCEDRKAEPEGLRRLHRAGVQIAIMT
FKDYFYCWNTFVENREKTFKAWEGLHENSVRLSRQ
LRRILLPLYEVDDLRDAFRTLGL
Bovine AID:
(SEQ ID NO: 295)
MDSLLKKQRQFLYQFKNVRWAKGRHETYLCYVVKR
RDSPTSFSLDFGHLRNKAGCHVELLFLRYISDWDL
DPGRCYRVTWFTSWSPCYDCARHVADFLRGYPNLS
LRIFTARLYFCDKERKAEPEGLRRLHRAGVQIAIM
TFKDYFYCWNTFVENHERTFKAWEGLHENSVRLSR
QLRRILLPLYEVDDLRDAFRTLGL
Rat:AID:
(SEQ ID NO: 296)
MAVGSKPKAALVGPHWERERIWCFLCSTGLGTQQT
GQTSRWLRPAATQDPVSPPRSLLMKQRKFLYHFKN
VRWAKGRHETYLCYVVKRRDSATSFSLDFGYLRNK
SGCHVELLFLRYISDWDLDPGRCYRVTWFTSWSPC
YDCARHVADFLRGNPNLSLRIFTARLTGWGALPAG
LMSPARPSDYFYCWNTFVENHERTFKAWEGLHENS
VRLSRRLRRILLPLYEVDDLRDAFRTLGL
Mouse APOBEC-3:
(SEQ ID NO: 297)
MGPFCLGCSHRKCYSPIRNLISQETFKFHFKNLGY
AKGRKDTFLCYEVTRKDCDSPVSLHHGVFKNKDNI
HAEICFLYWFHDKVLKVLSPREEFKITWYMSWSPC
FECAEQIVRFLATHHNLSLDIFSSRLYNVQDPETQ
QNLCRLVQEGAQVAAMDLYEFKKCWKKFVDNGGRR
FRPWKRLLTNFRYQDSKLQEILRPCYIPVPSSSSS
TLSNICLTKGLPETRFCVEGRRMDPLSEEEFYSQF
YNQRVKHLCYYHRMKPYLCYQLEQFNGQAPLKGCL
LSEKGKQHAEILFLDKIRSMELSQVTITCYLTWSP
CPNCAWQLAAFKRDRPDLILHIYTSRLYFHWKRPF
QKGLCSLWQSGILVDVMDLPQFTDCWTNFVNPKRP
FWPWKGLEIISRRTQRRLRRIKESWGLQDLVNDFG
NLQLGPPMS
Rat APOBEC-3:
(SEQ ID NO: 298)
MGPFCLGCSHRKCYSPIRNLISQETFKFHFKNLRY
AIDRKDTFLCYEVTRKDCDSPVSLHHGVFKNKDNI
HAEICFLYWFHDKVLKVLSPREEFKITWYMSWSPC
FECAEQVLRFLATHHNLSLDIFSSRLYNIRDPENQ
QNLCRLVQEGAQVAAMDLYEFKKCWKKFVDNGGRR
FRPWKKLLTNFRYQDSKLQEILRPCYIPVPSSSSS
TLSNICLTKGLPETRFCVERRRVHLLSEEEFYSQF
YNQRVKHLCYYHGVKPYLCYQLEQFNGQAPLKGCL
LSEKGKQHAEILFLDKIRSMELSQVIITCYLTWSP
CPNCAWQLAAFKRDRPDLILHIYTSRLYFHWKRPF
QKGLCSLWQSGILVDVMDLPQFTDCWTNFVNPKRP
FWPWKGLEIISRRTQRRLHRIKESWGLQDLVNDFG
NLQLGPPMS
Rhesus macaque APOBEC-3G:
(SEQ ID NO: 299)
MVEPMDPRTFVSNFNNRPILSGLNTVWLCCEVKTK
DPSGPPLDAKIFQGKVYSKAKYHPEMRFLRWFHKW
RQLHHDQEYKVTWYVSWSPCTRCANSVATFLAKDP
KVTLTIFVARLYYFWKPDYQQALRILCQKRGGPHA
TMKIMNYNEFQDCWNKFVDGRGKPFKPRNNLPKHY
TLLQATLGELLRHLMDPGTFTSNFNNKPWVSGQHE
TYLCYKVERLHNDTWVPLNQHRGFLRNQAPNIHGF
PKGRHAELCFLDLIPFWKLDGQQYRVTCFTSWSPC
FSCAQEMAKFISNNEHVSLCIFAARIYDDQGRYQE
GLRALHRDGAKIAMMNYSEFEYCWDTFVDRQGRPF
QPWDGLDEHSQALSGRLRAI
Chimpanzee APOBEC-3G:
(SEQ ID NO: 300)
MKPHFRNPVERMYQDTFSDNFYNRPILSHRNTVWL
CYEVKTKGPSRPPLDAKIFRGQVYSKLKYHPEMRF
FHWFSKWRKLHRDQEYEVTWYISWSPCTKCTRDVA
TFLAEDPKVTLTIFVARLYYFWDPDYQEALRSLCQ
KRDGPRATMKIMNYDEFQHCWSKFVYSQRELFEPW
NNLPKYYILLHIMLGEILRHSMDPPTFTSNFNNEL
WVRGRHETYLCYEVERLHNDTWVLLNQRRGFLCNQ
APHKHGFLEGRHAELCFLDVIPFWKLDLHQDYRVT
CFTSWSPCFSCAQEMAKFISNNKHVSLCIFAARIY
DDQGRCQEGLRTLAKAGAKISIMTYSEFKHCWDTF
VDHQGCPFQPWDGLEEHSQALSGRLRAILQNQGN
Green monkey APOBEC-3G:
(SEQ ID NO: 301)
MNPQIRNMVEQMEPDIFVYYFNNRPILSGRNTVWL
CYEVKTKDPSGPPLDANIFQGKLYPEAKDHPEMKF
LHWFRKWRQLHRDQEYEVTWYVSWSPCTRCANSVA
TFLAEDPKVTLTIFVARLYYFWKPDYQQALRILCQ
ERGGPHATMKIMNYNEFQHCWNEFVDGQGKPFKPR
KNLPKHYTLLHATLGELLRHVMDPGTFTSNFNNKP
WVSGQRETYLCYKVERSHNDTWVLLNQHRGFLRNQ
APDRHGFPKGRHAELCFLDLIPFWKLDDQQYRVTC
FTSWSPCFSCAQKMAKFISNNKHVSLCIFAARIYD
DQGRCQEGLRTLHRDGAKIAVMNYSEFEYCWDTFV
DRQGRPFQPWDGLDEHSQALSGRLRAI
Human APOBEC-3G:
(SEQ ID NO: 302)
MKPHFRNTVERMYRDTFSYNFYNRPILSRRNTVWL
CYEVKTKGPSRPPLDAKIFRGQVYSELKYHPEMRF
FHWFSKWRKLHRDQEYEVTWYISWSPCTKCTRDMA
TFLAEDPKVTLTIFVARLYYFWDPDYQEALRSLCQ
KRDGPRATMKIMNYDEFQHCWSKFVYSQRELFEPW
NNLPKYYILLHIMLGEILRHSMDPPTFTFNFNNEP
WVRGRHETYLCYEVERMHNDTWVLLNQRRGFLCNQ
APHKHGFLEGRHAELCFLDVIPFWKLDLDQDYRVT
CFTSWSPCFSCAQEMAKFISKNKHVSLCIFTARIY
DDQGRCQEGLRTLAEAGAKISIMTYSEFKHCWDTF
VDHQGCPFQPWDGLDEHSQDLSGRLRAILQNQEN
Human APOBEC-3F:
(SEQ ID NO: 303)
MKPHFRNTVERMYRDTFSYNFYNRPILSRRNTVWL
CYEVKTKGPSRPRLDAKIFRGQVYSQPEHHAEMCF
LSWFCGNQLPAYKCFQITWFVSWTPCPDCVAKLAE
FLAEHPNVTLTISAARLYYYWERDYRRALCRLSQA
GARVKIMDDEEFAYCWENFVYSEGQPFMPWYKFDD
NYAFLHRTLKEILRNPMEAMYPHIFYFHFKNLRKA
YGRNESWLCFTMEVVKHHSPVSWKRGVFRNQVDPE
THCHAERCFLSWFCDDILSPNTNYEVTWYTSWSPC
PECAGEVAEFLARHSNVNLTIFTARLYYFWDTDYQ
EGLRSLSQEGASVEIMGYKDFKYCWENFVYNDDEP
FKPWKGLKYNFLFLDSKLQEILE
Human APOBEC-3B:
(SEQ ID NO: 304)
MNPQIRNPMERMYRDTFYDNFENEPILYGRSYTWL
CYEVKIKRGRSNLLWDTGVFRGQVYFKPQYHAEMC
FLSWFCGNQLPAYKCFQITWFVSWTPCPDCVAKLA
EFLSEHPNVTLTISAARLYYYWERDYRRALCRLSQ
AGARVTIMDYEEFAYCWENFVYNEGQQFMPWYKFD
ENYAFLHRTLKEILRYLMDPDTFTFNFNNDPLVLR
RRQTYLCYEVERLDNGTWVLMDQHMGFLCNEAKNL
LCGFYGRHAELRFLDLVPSLQLDPAQIYRVTWFIS
WSPCFSWGCAGEVRAFLQENTHVRLRIFAARIYDY
DPLYKEALQMLRDAGAQVSIMTYDEFEYCWDTFVY
RQGCPFQPWDGLEEHSQALSGRLRAILQNQGN
Rat APOBEC-3B:
(SEQ ID NO: 305)
MQPQGLGPNAGMGPVCLGCSHRRPYSPIRNPLKKL
YQQTFYFHFKNVRYAWGRKNNFLCYEVNGMDCALP
VPLRQGVFRKQGHIHAELCFIYWFHDKVLRVLSPM
EEFKVTWYMSWSPCSKCAEQVARFLAAHRNLSLAI
FSSRLYYYLRNPNYQQKLCRLIQEGVHVAAMDLPE
FKKCWNKFVDNDGQPFRPWMRLRINFSFYDCKLQE
IFSRMNLLREDVFYLQFNNSHRVKPVQNRYYRRKS
YLCYQLERANGQEPLKGYLLYKKGEQHVEILFLEK
MRSMELSQVRITCYLTWSPCPNCARQLAAFKKDHP
DLILRIYTSRLYFYWRKKFQKGLCTLWRSGIHVDV
MDLPQFADCWTNFVNPQRPFRPWNELEKNSWRIQR
RLRRIKESWGL
Bovine APOBEC-3B:
(SEQ ID NO: 306)
DGWEVAFRSGTVLKAGVLGVSMTEGWAGSGHPGQG
ACVWTPGTRNTMNLLREVLFKQQFGNQPRVPAPYY
RRKTYLCYQLKQRNDLTLDRGCFRNKKQRHAEIRF
IDKINSLDLNPSQSYKIICYITWSPCPNCANELVN
FITRNNHLKLEIFASRLYFHWIKSFKMGLQDLQNA
GISVAVMTHTEFEDCWEQFVDNQSRPFQPWDKLEQ
YSASIRRRLQRILTAPI
Chimpanzee APOBEC-3B:
(SEQ ID NO: 307)
MNPQIRNPMEWMYQRTFYYNFENEPILYGRSYTWL
CYEVKIRRGHSNLLWDTGVFRGQMYSQPEHHAEMC
FLSWFCGNQLSAYKCFQITWFVSWTPCPDCVAKLA
KFLAEHPNVTLTISAARLYYYWERDYRRALCRLSQ
AGARVKIMDDEEFAYCWENFVYNEGQPFMPWYKFD
DNYAFLHRTLKEIIRHLMDPDTFTFNFNNDPLVLR
RHQTYLCYEVERLDNGTWVLMDQHMGFLCNEAKNL
LCGFYGRHAELRFLDLVPSLQLDPAQIYRVTWFIS
WSPCFSWGCAGQVRAFLQENTHVRLRIFAARIYDY
DPLYKEALQMLRDAGAQVSIMTYDEFEYCWDTFVY
RQGCPFQPWDGLEEHSQALSGRLRAILQVRASSLC
MVPHRPPPPPQSPGPCLPLCSEPPLGSLLPTGRPA
PSLPFLLTASFSFPPPASLPPLPSLSLSPGHLPVP
SFHSLTSCSIQPPCSSRIRETEGWASVSKEGRDLG
Human APOBEC-3C:
(SEQ ID NO: 308)
MNPQIRNPMKAMYPGTFYFQFKNLWEANDRNETWL
CFTVEGIKRRSVVSWKTGVFRNQVDSETHCHAERC
FLSWFCDDILSPNTKYQVTWYTSWSPCPDCAGEVA
EFLARHSNVNLTIFTARLYYFQYPCYQEGLRSLSQ
EGVAVEIMDYEDFKYCWENFVYNDNEPFKPWKGLK
TNFRLLKRRLRESLQ
Gorilla APOBEC3C:
(SEQ ID NO: 309)
MNPQIRNPMKAMYPGTFYFQFKNLWEANDRNETWL
CFTVEGIKRRSVVSWKTGVFRNQVDSETHCHAERC
FLSWFCDDILSPNTNYQVTWYTSWSPCPECAGEVA
EFLARHSNVNLTIFTARLYYFQDTDYQEGLRSLSQ
EGVAVKIMDYKDFKYCWENFVYNDDEPFKPWKGLK
YNFRFLKRRLQEILE
Human APOBEC-3A:
(SEQ ID NO: 310)
MEASPASGPRHLMDPHIFTSNFNNGIGRHKTYLCY
EVERLDNGTSVKMDQHRGFLHNQAKNLLCGFYGRH
AELRFLDLVPSLQLDPAQIYRVTWFISWSPCFSWG
CAGEVRAFLQENTHVRLRIFAARIYDYDPLYKEAL
QMLRDAGAQVSIMTYDEFKHCWDTFVDHQGCPFQP
WDGLDEHSQALSGRLRAILQNQGN
Rhesus macaque APOBEC-3A:
(SEQ ID NO: 311)
MDGSPASRPRHLMDPNTFTFNFNNDLSVRGRHQTY
LCYEVERLDNGTWVPMDERRGFLCNKAKNVPCGDY
GCHVELRFLCEVPSWQLDPAQTYRVTWFISWSPCF
RRGCAGQVRVFLQENKHVRLRIFAARIYDYDPLYQ
EALRTLRDAGAQVSIMTYEEFKHCWDTFVDRQGRP
FQPWDGLDEHSQALSGRLRAILQNQGN
Bovine APOBEC-3A:
(SEQ ID NO: 312)
MDEYTFTENFNNQGWPSKTYLCYEMERLDGDATIP
LDEYKGFVRNKGLDQPEKPCHAELYFLGKIHSWNL
DRNQHYRLTCFISWSPCYDCAQKLTTFLKENHHIS
LHILASRIYTHNRFGCHQSGLCELQAAGARITIMT
FEDFKHCWETFVDHKGKPFQPWEGLNVKSQALCTE
LQAILKTQQN
Human APOBEC-3H:
(SEQ ID NO: 313)
MALLTAETFRLQFNNKRRLRRPYYPRKALLCYQLT
PQNGSTPTRGYFENKKKCHAEICFINEIKSMGLDE
TQCYQVTCYLTWSPCSSCAWELVDFIKAHDHLNLG
IFASRLYYHWCKPQQKGLRLLCGSQVPVEVMGFPK
FADCWENFVDHEKPLSFNPYKMLEELDKNSRAIKR
RLERIKIPGVRAQGRYMDILCDAEV
Rhesus macaque APOBEC-3H:
(SEQ ID NO: 314)
MALLTAKTFSLQFNNKRRVNKPYYPRKALLCYQLT
PQNGSTPTRGHLKNKKKDHAEIRFINKIKSMGLDE
TQCYQVTCYLTWSPCPSCAGELVDFIKAHRHLNLR
IFASRLYYHWRPNYQEGLLLLCGSQVPVEVMGLPE
FTDCWENFVDHKEPPSFNPSEKLEELDKNSQAIKR
RLERIKSRSVDVLENGLRSLQLGPVTPSSSIRNSR
Human APOBEC-3D:
(SEQ ID NO: 315)
MNPQIRNPMERMYRDTFYDNFENEPILYGRSYTWL
CYEVKIKRGRSNLLWDTGVFRGPVLPKRQSNHRQE
VYFRFENHAEMCFLSWFCGNRLPANRRFQITWFVS
WNPCLPCVVKVTKFLAEHPNVTLTISAARLYYYRD
RDWRWVLLRLHKAGARVKIMDYEDFAYCWENFVCN
EGQPFMPWYKFDDNYASLHRTLKEILRNPMEAMYP
HIFYFHFKNLLKACGRNESWLCFTMEVTKHHSAVF
RKRGVFRNQVDPETHCHAERCFLSWFCDDILSPNT
NYEVTWYTSWSPCPECAGEVAEFLARHSNVNLTIF
TARLCYFWDTDYQEGLCSLSQEGASVKIMGYKDFV
SCWKNFVYSDDEPFKPWKGLQTNFRLLKRRLREIL
Q
Human APOBEC-1:
(SEQ ID NO: 316)
MTSEKGPSTGDPTLRRRIEPWEFDVFYDPRELRKE
ACLLYEIKWGMSRKIWRSSGKNTTNHVEVNFIKKF
TSERDFHPSMSCSITWFLSWSPCWECSQAIREFLS
RHPGVTLVIYVARLFWHMDQQNRQGLRDLVNSGVT
IQIMRASEYYHCWRNFVNYPPGDEAHWPQYPPLWM
MLYALELHCIILSLPPCLKISRRWQNHLTFFRLHL
QNCHYQTIPPHILLATGLIHPSVAWR
Mouse APOBEC-1:
(SEQ ID NO: 317)
MSSETGPVAVDPTLRRRIEPHEFEVFFDPRELRKE
TCLLYEINWGGRHSVWRHTSQNTSNHVEVNFLEKF
TTERYFRPNTRCSITWFLSWSPCGECSRAITEFLS
RHPYVTLFIYIARLYHHTDQRNRQGLRDLISSGVT
IQIMTEQEYCYCWRNFVNYPPSNEAYWPRYPHLWV
KLYVLELYCIILGLPPCLKILRRKQPQLTFFTITL
QTCHYQRIPPHLLWATGLK
Rat APOBEC-1:
(SEQ ID NO: 318)
[sequence omitted]
Human APOBEC-2:
(SEQ ID NO: 319)
MAQKEEAAVATEAASQNGEDLENLDDPEKLKELIE
LPPFEIVTGERLPANFFKFQFRNVEYSSGRNKTFL
CYVVEAQGKGGQVQASRGYLEDEHAAAHAEEAFFN
TILPAFDPALRYNVTWYVSSSPCAACADRIIKTLS
KTKNLRLLILVGRLFMWEEPEIQAALKKLKEAGCK
LRIMKPQDFEYVWQNFVEQEEGESKAFQPWEDIQE
NFLYYEEKLADILK
Mouse APOBEC-2:
(SEQ ID NO: 320)
MAQKEEAAEAAAPASQNGDDLENLEDPEKLKELID
LPPFEIVTGVRLPVNFFKFQFRNVEYSSGRNKTFL
CYVVEVQSKGGQAQATQGYLEDEHAGAHAEEAFFN
TILPAFDPALKYNVTWYVSSSPCAACADRILKTLS
KTKNLRLLILVSRLFMWEEPEVQAALKKLKEAGCK
LRIMKPQDFEYIWQNFVEQEEGESKAFEPWEDIQE
NFLYYEEKLADILK
Rat APOBEC-2:
(SEQ ID NO: 321)
MAQKEEAAEAAAPASQNGDDLENLEDPEKLKELID
LPPFEIVTGVRLPVNFFKFQFRNVEYSSGRNKTFL
CYVVEAQSKGGQVQATQGYLEDEHAGAHAEEAFFN
TILPAFDPALKYNVTWYVSSSPCAACADRILKTLS
KTKNLRLLILVSRLFMWEEPEVQAALKKLKEAGCK
LRIMKPQDFEYLWQNFVEQEEGESKAFEPWEDIQE
NFLYYEEKLADILK
Bovine APOBEC-2:
(SEQ ID NO: 322)
MAQKEEAAAAAEPASQNGEEVENLEDPEKLKELIE
LPPFEIVTGERLPAHYFKFQFRNVEYSSGRNKTFL
CYVVEAQSKGGQVQASRGYLEDEHATNHAEEAFFN
SIMPTFDPALRYMVTWYVSSSPCAACADRIVKTLN
KTKNLRLLILVGRLFMWEEPEIQAALRKLKEAGCR
LRIMKPQDFEYIWQNFVEQEEGESKAFEPWEDIQE
NFLYYEEKLADILK
Petromyzon marinus CD A1 (pmCDAl):
(SEQ ID NO: 323)
MTDAEYVRIHEKLDIYTFKKQFFNNKKSVSHRCYV
LFELKRRGERRACFWGYAVNKPQSGTERGIHAEIF
SIRKVEEYLRDNPGQFTINWYSSWSPCADCAEKIL
EWYNQELRGNGHTLKIWACKLYYEKNARNQIGLWN
LRDNGVGLNVMVSEHYQCCRKIFIQSSHNQLNENR
WLEKTLKRAEKRRSELSIMIQVKILHTTKSPAV
Human APOBEC3G D316R_D317R:
(SEQ ID NO: 324)
MKPHFRNTVERMYRDTFSYNFYNRPILSRRNTVWL
CYEVKTKGPSRPPLDAKIFRGQVYSELKYHPEMRF
FHWFSKWRKLHRDQEYEVTWYI
SWSPCTKCTRDMATFLAEDPKVTLTIFVARLYYFW
DPDYQEALRSLCQKRDGPRATMKIMNYDEFQHCWS
KFVYSQRELFEPWNNLPKYYILLHIMLGEILRHSM
DPPTFTFNFNNEPWVRGRHETYLCYEVERMHNDTW
VLLNQRRGFLCNQAPHKHGFLEGRHAELCFLDVIP
FWKLDLDQDYRVTCFTSWSPCFSCAQEMAKFISKN
KHVSLCIFTARIYRRQGRCQEGLRTLAEAGAKISI
MTYSEFKHCWDTFVDHQGCPFQPWDGLDEHSQDLS
GRLRAILQNQEN
Human APOBEC3G chain A:
(SEQ ID NO: 325)
MDPPTFTFNFNNEPWVRGRHETYLCYEVERMHNDT
WVLLNQRRGFLCNQAPHKHGFLEGRHAELCFLDVI
PFWKLDLDQDYRVTCFTSWSPCFSCAQEMAKFISK
NKHVSLCIFTARIYDDQGRCQEGLRTLAEAGAKIS
IMTYSEFKHCWDTFVDHQGCPFQPWDGLDEHSQDL
SGRLRAILQ
Human APOBEC3G chain A D120R_D121R:
(SEQ ID NO: 326)
MDPPTFTFNFNNEPWVRGRHETYLCYEVERMHNDT
WVLLNQRRGFLCNQAPHKHGFLEGRHAELCFLDVI
PFWKLDLDQDYRVTCFTSWSPCFSCAQEMAKFISK
NKHVSLCIFTARIYRRQGRCQEGLRTLAEAGAKIS
IMTYSEFKHCWDTFVDHQGCPFQPWDGLDEHSQDL
SGRLRAILQ

[0272] Any of the aforementioned DNA effector domains may be subjected to a continuous evolution process (e.g., PACE) or may be otherwise further evolved using a mutagenesis methodology known in the art.

[0273] In some embodiments, the cytidine deaminase is an apolipoprotein B mRNA-editing complex (APOBEC) family deaminase. In some embodiments, the deaminase is an APOBEC1 deaminase. In some embodiments, the deaminase is an APOBEC2 deaminase. In some embodiments, the deaminase is an APOBEC3 deaminase. In some embodiments, the deaminase is an APOBEC3A deaminase. In some embodiments, the deaminase is an APOBEC3B deaminase. In some embodiments, the deaminase is an APOBEC3C deaminase. In some embodiments, the deaminase is an APOBEC3D deaminase. In some embodiments, the deaminase is an APOBEC3E deaminase. In some embodiments, the deaminase is an APOBEC3F deaminase. In some embodiments, the deaminase is an APOBEC3G deaminase. In some embodiments, the deaminase is an APOBEC3H deaminase. In some embodiments, the deaminase is an APOBEC4 deaminase. In some embodiments, the deaminase is an activation-induced deaminase (AID). In some embodiments, the deaminase is a vertebrate deaminase. In some embodiments, the deaminase is an invertebrate deaminase. In some embodiments, the deaminase is a human, chimpanzee, gorilla, monkey, cow, dog, rat, or mouse deaminase. In some embodiments, the deaminase is a human deaminase. In some embodiments, the deaminase is a rat deaminase, e.g., rAPOBEC1.

[0274] Some aspects of the disclosure are based on the recognition that modulating the deaminase domain catalytic activity of any of the base editors described herein, for example by making point mutations in the deaminase domain, affect the processivity of the base editors (e.g., base editors). For example, mutations that reduce, but do not eliminate, the catalytic activity of a deaminase domain within a base editor can make it less likely that the deaminase domain will catalyze the deamination of a residue adjacent to a target residue, thereby narrowing the deamination window. The ability to narrow the deamination window may prevent unwanted deamination of residues adjacent of specific target residues, which may decrease or prevent off-target effects.

[0275] In some embodiments, any of the base editors described herein comprise a deaminase domain (e.g., a cytidine deaminase domain) that has reduced catalytic deaminase activity. In some embodiments, any of the base editors described herein comprise a deaminase domain (e.g., a cytidine deaminase domain) that has a reduced catalytic deaminase activity as compared to an appropriate control. For example, the appropriate control may be the deaminase activity of the deaminase prior to introducing one or more mutations into the deaminase. In other embodiments, the appropriate control may be a wild-type deaminase. In some embodiments, the appropriate control is a wild-type apolipoprotein B mRNA-editing complex (APOBEC) family deaminase. In some embodiments, the appropriate control is an APOBEC1 deaminase, an APOBEC2 deaminase, an APOBEC3A deaminase, an APOBEC3B deaminase, an APOBEC3C deaminase, an APOBEC3D deaminase, an APOBEC3F deaminase, an APOBEC3G deaminase, or an APOBEC3H deaminase. In some embodiments, the appropriate control is an activation induced deaminase (AID). In some embodiments, the appropriate control is a cytidine deaminase 1 from Petromyzon marinus (pmCDA1). In some embodiments, the deaminse domain may be a deaminase domain that has at least 1%, at least 5%, at least 15%, at least 20%, at least 25%, at least 30%, at least 40%, at least 50%, at least 60%, at lest 70%, at least 80%, at least 90%, or at least 95% less catalytic deaminase activity as compared to an appropriate control.

[0276] The apolipoprotein B mRNA-editing complex (APOBEC) family of cytidine deaminase enzymes encompasses eleven proteins that serve to initiate mutagenesis in a controlled and beneficial manner. One family member, activation-induced cytidine deaminase (AID), is responsible for the maturation of antibodies by converting cytosines in ssDNA to uracils in a transcription-dependent, strand-biased fashion. The apolipoprotein B editing complex 3 (APOBEC3) enzyme provides protection to human cells against a certain HIV-1 strain via the deamination of cytosines in reverse-transcribed viral ssDNA. These proteins all require a Zn2+-coordinating motif (His-X-Glu-X23-26-Pro-Cys-X2-4-Cys; (SEQ ID NO: 402) and bound water molecule for catalytic activity. The Glu residue acts to activate the water molecule to a zinc hydroxide for nucleophilic attack in the deamination reaction. Each family member preferentially deaminates at its own particular “hotspot”, ranging from WRC (W is A or T, R is A or G) for hAID, to TTC for hAPOBEC3F. A recent crystal structure of the catalytic domain of APOBEC3G revealed a secondary structure comprised of a five-stranded (3-sheet core flanked by six a-helices, which is believed to be conserved across the entire family. The active center loops have been shown to be responsible for both ssDNA binding and in determining “hotspot” identity. Overexpression of these enzymes has been linked to genomic instability and cancer, thus highlighting the importance of sequence-specific targeting.

[0277] Some aspects of this disclosure relate to the recognition that the activity of cytidine deaminase enzymes such as APOBEC enzymes can be directed to a specific site in genomic DNA. Without wishing to be bound by any particular theory, advantages of using Cas9 as a recognition agent include (1) the sequence specificity of Cas9 can be easily altered by simply changing the sgRNA sequence; and (2) Cas9 binds to its target sequence by denaturing the dsDNA, resulting in a stretch of DNA that is single-stranded and therefore a viable substrate for the deaminase. It should be understood that other catalytic domains, or catalytic domains from other deaminases, can also be used to generate base editors with Cas9, and that the disclosure is not limited in this regard.

[0278] Some aspects of this disclosure are based on the recognition that Cas9:deaminase base editors can efficiently deaminate nucleotides. In view of the results provided herein regarding the nucleotides that can be targeted by Cas9:deaminase base editors, a person of skill in the art will be able to design suitable guide RNAs to target the base editors to a target sequence that comprises a nucleotide to be deaminated.

[0279] In certain embodiments, the reference cytidine deaminase domain comprises a “FERNY” polypeptide having an amino acid sequence according to SEQ ID NO: 327 or an amino acid sequence that is at least 60%, 65%, 70%, 75%, 80%, 85%, 90%, 95, 98%, 99%, or 99.5% identical to SEQ ID NO: 327, as follows:

(SEQ ID NO: 327)
MFERNYDPRELRKETYLLYEIKWGKSGKLWRHWCQ
NNRTQHAEVYFLENIFNARRFNPSTHCSITWYLSW
SPCAECSQKIVDFLKEHPNVNLEIYVARLYYHEDE
RNRQGLRDLVNSGVTIRIMDLPDYNYCWKTFVSDQ
GGDEDYWPGHFAPWIKQYSLKL

[0280] In certain other embodiment, the evolved cytidine deaminase domain (i.e., as a result of the continuous evolution process described herein) comprises a “evoFERNY” polypeptide having an amino acid sequence according to SEQ ID NO: 328 or an amino acid sequence that is at least 60%, 65%, 70%, 75%, 80%, 85%, 90%, 95, 98%, 99%, or 99.5% identical to SEQ ID NO: 328, comprising an H102P and D104N substitutions, as follows:

(SEQ ID NO: 328)
MFERNYDPRELRKETYLLYEIKWGKSGKLWRHWCQ
NNRTQHAEVYFLENIFNARRFNPSTHCSITWYLSW
SPCAECSQKIVDFLKEHPNVNLEIYVARLYYPENE
RNRQGLRDLVNSGVTIRIMDLPDYNYCWKTFVSDQ
GGDEDYWPGHFAPWIKQYSLKL

[0281] In other embodiments, the reference cytidine deaminase domain comprises a “Rat APOBEC-1” polypeptide having an amino acid sequence according to SEQ ID NO: 318, or an amino acid sequence that is at least 60%, 65%, 70%, 75%, 80%, 85%, 90%, 95, 98%, 99%, or 99.5% identical to SEQ ID NO: 318.

[0282] In certain other embodiment, the evolved cytidine deaminase domain (i.e., as a result of the continuous evolution process described herein) comprises a “evoAPOBEC” polypeptide having an amino acid sequence according to SEQ ID NO: 330, or an amino acid sequence that is at least 60%, 65%, 70%, 75%, 80%, 85%, 90%, 95, 98%, 99%, or 99.5% identical to SEQ ID NO: 330, and comprising substitutions E4K; H109N; H122L; D124N; R154H; A1655; P2015; F2055, as follows:

(SEQ ID NO: 330)
MSSKTGPVAVDPTLRRRIEPHEFEVFFDPRELRKE
TCLLYEINWGGRHSIWRHTSQNTNKHVEVNFIEKF
TTERYFCPNTRCSITWFLSWSPCGECSRAITEFLS
RYPNVTLFIYIARLYHLANPRNRQGLRDLISSGVT
IQIMTEQESGYCWHNFVNYSPSNESHWPRYPHLWV
RLYVLELYCIILGLPPCLNILRRKQSQLTSFTIAL
QSCHYQRLPPHILWATGLK

[0283] In still other embodiments, the reference cytidine deaminase domain comprises a “Petromyzon marinus CDA1 (pmCDA1)” polypeptide having an amino acid sequence according to SEQ ID NO: 323, or an amino acid sequence that is at least 60%, 65%, 70%, 75%, 80%, 85%, 90%, 95, 98%, 99%, or 99.5% identical to SEQ ID NO: 323.

[0284] In other embodiment, the evolved cytidine deaminase domain (i.e., as a result of the continuous evolution process described herein) comprises a “evoCDA” polypeptide having an amino acid sequence according to SEQ ID NO: 132 or an amino acid sequence that is at least 60%, 65%, 70%, 75%, 80%, 85%, 90%, 95, 98%, 99%, or 99.5% identical to SEQ ID NO: 332 and comprising substitutions F23S; A123V; I195F, as follows:

(SEQ ID NO: 332)
MTDAEYVRIHEKLDIYTFKKQFSNNKKSVSHRCYV
LFELKRRGERRACFWGYAVNKPQSGTERGIHAEIF
SIRKVEEYLRDNPGQFTINWYSSWSPCADCAEKIL
EWYNQELRGNGHTLKIWVCKLYYEKNARNQIGLWN
LRDNGVGLNVMVSEHYQCCRKIFIQSSHNQLNENR
WLEKTLKRAEKRRSELSIMFQVKILHTTSPAV

[0285] In yet other embodiments, the reference cytidine deaminase domain comprises a “Anc689 APOBEC” polypeptide having an amino acid sequence according to SEQ ID NO: 133 or an amino acid sequence that is at least 60%, 65%, 70%, 75%, 80%, 85%, 90%, 95, 98%, 99%, or 99.5% identical to SEQ ID NO: 333, as follows:

(SEQ ID NO: 333)
MSSETGPVAVDPTLRRRIEPHEFEVFFDPRELRKE
TCLLYEIKWGTSHKIWRHSSKNTTKHVEVNFIEKF
TSERHFCPSTSCSITWFLSWSPCGECSKAITEFLS
QHPNVTLVIYVARLYHHMDQQNRQGLRDLVNSGVT
IQIMTAPEYDYCWRNFVNYPPGKEAHWPRYPPLWM
KLYALELHAGILGLPPCLNILRRKQPQLTFFTIAL
QSCHYQRLPPHILWATGLK

[0286] In other embodiments, the evolved cytidine deaminase domain (i.e., as a result of the continuous evolution process described herein) comprises a “evoAnc689 APOBEC” polypeptide having an amino acid sequence according to SEQ ID NO: 334 or an amino acid sequence that is at least 60%, 65%, 70%, 75%, 80%, 85%, 90%, 95, 98%, 99%, or 99.5% identical to SEQ ID NO: 334 and comprising substitutions E4K; H122L; D124N; R154H; A1655; P2015; F2055, as follows:

(SEQ ID NO: 334)
MSSKTGPVAVDPTLRRRIEPHEFEVFFDPRELRKE
TCLLYEIKWGTSHKTWRHSSKNTTKHVEVNFIEKF
TSERHFCPSTSCSITWFLSWSPCGECSKAITEFLS
QHPNVTLVIYVARLYHLMNQQNRQGLRDLVNSGVT
IQIMTAPEYDYCWHNFVNYPPGKESHWPRYPPLWM
KLYALELHAGILGLPPCLNILRRKQSQLTSFTIAL
QSCHYQRLPPHILWATGLK.

[0287] In some embodiments, the cytidine deaminase domain comprises an amino acid sequence that is at least 60%, at least 65%, at least 70%, at least 75%, at least 80%, at least 85%, at least 90%, at least 95%, at least 96%, at least 97%, at least 98%, at least 99%, or at least 99.5% identical to any one of the amino acid sequences set forth in any one of SEQ ID NOs: 292-326, and SEQ ID NOs: 327, 328, 330, and 332-334, or to any of the cytidine deaminases described herein. The disclosure provides any deaminase domains with a certain percent identity plus any of the mutations or combinations thereof described herein. In exemplary embodiments, the cytosine deaminase domain comprises an amino acid sequence having at least 90%, at least 95%, at least 98%, or at least 99% identity to any one of SEQ ID NOs: 292-326. In some embodiments, the cytosine deaminase domain comprises the sequence of any one of SEQ ID NOs: 292-326, e.g., SEQ ID NO: 318 (rat APOBEC-1, or rAPOBEC1).

[0288] In some embodiments, the cytidine deaminase comprises an amino acid sequence that has 1, 2, 3, 4, 5, 6, 7, 8, 9, 10, 11, 12, 13, 14, 15, 16, 17, 18, 19, 20, 21, 22, 21, 24, 25, 26, 27, 28, 29, 30, 31, 32, 33, 34, 35, 36, 37, 38, 39, 40, 41, 42, 43, 44, 45, 46, 47, 48, 49, 50, or more amino acids that differ relative to any one of the amino acid sequences set forth in SEQ ID NOs: 292-326 and SEQ ID NOs: 327, 328, 330, and 332-334, or any of the cytidine deaminases described herein. These differences may comprise amino acids that have been inserted, deleted, or substituted relative to the amino acid sequence of any of SEQ ID NOs: 292-326 and SEQ ID NOs: 327, 328, 330, and 332-334. In some embodiments, any of the adenosine deaminase domains described herein may comprise an amino acid sequence having 1, 2, 3, 4, 5, 6, 7, 8, 9, 10, 11, 12, 13, 14, 15, 16, 17, 18, 19, 20, 25, 30, or more than 30 amino acids that differ relative to the amino acid sequence of a wild type cytidine deaminase (e.g., rAPOBEC1). In some embodiments, the adenosine deaminase domains comprise truncations at the N-terminus or C-terminus relative to a wild-type cytidine deaminase.

[0289] In some embodiments, the adenosine deaminase comprises an amino acid sequence that has at least 5, at least 10, at least 15, at least 20, at least 25, at least 30, at least 35, at least 40, at least 45, at least 50, at least 60, at least 70, at least 80, at least 90, at least 100, at least 110, at least 120, at least 130, at least 140, at least 150, at least 160, or at least 170 identical contiguous amino acid residues as compared to any one of the amino acid sequences set forth in SEQ ID NOs: 292-326 and SEQ ID NOs: 327, 328, 330, and 332-334, or any of the cytidine deaminases described herein.

[0290] In some aspects, the specification provides evolved cytidine deaminases which are used to construct base editors that have improved properties. For example, evolved cytidine deaminases, such as those provided herein, are capable of improving base editing efficiency and/or improving the ability of base editors to more efficiently edit bases regardless of the surrounding sequence. For example, in some aspects the disclosure provides evolved APOBEC deaminases (e.g., evolved rAPOBEC1) with improved base editing efficiency in the context of a 5′-G-3′ when it is 5′ to a target base (e.g., C). In some embodiments, the disclosure provides base editors comprising any of the evolved cytidine deaminases described herein. It should be appreciated that any of the evolved cydidine deaminases described herein may be used as a deaminase in a base editor protein, such as any of the base editors described herein. It should also be appreciated that the disclosure contemplates cytidine deaminases having any of the mutations provided herein, for example any of the mutations described in the Examples section.

### Other Functional Domains

[0291] In various embodiments, the base editors and their various components may comprise additional functional moieities, such as, but not limited to, linkers, uracil glycosylase inhibitors, nuclear localization signals, split-intein sequences (to join split proteins, such as split napDNAbps, split adenosine deaminases, split cytidine deaminases, split CBEs, or split ABEs), and RNA-protein recruitment domains (such as, MS2 tagging system).

[0292] (1) Linkers

[0293] In certain embodiments, linkers may be used to link any of the protein or protein domains described herein (e.g., a deaminase domain and a Cas9 domain). The linker may be as simple as a covalent bond, or it may be a polymeric linker many atoms in length. In certain embodiments, the linker is a polypeptide or based on amino acids. In other embodiments, the linker is not peptide-like. In certain embodiments, the linker is a covalent bond (e.g., a carbon-carbon bond, disulfide bond, carbon-heteroatom bond, etc.). In certain embodiments, the linker is a carbon-nitrogen bond of an amide linkage. In certain embodiments, the linker is a cyclic or acyclic, substituted or unsubstituted, branched or unbranched aliphatic or heteroaliphatic linker. In certain embodiments, the linker is polymeric (e.g., polyethylene, polyethylene glycol, polyamide, polyester, etc.). In certain embodiments, the linker comprises a monomer, dimer, or polymer of aminoalkanoic acid. In certain embodiments, the linker comprises an aminoalkanoic acid (e.g., glycine, ethanoic acid, alanine, beta-alanine, 3-aminopropanoic acid, 4-aminobutanoic acid, 5-pentanoic acid, etc.). In certain embodiments, the linker comprises a monomer, dimer, or polymer of aminohexanoic acid (Ahx). In certain embodiments, the linker is based on a carbocyclic moiety (e.g., cyclopentane, cyclohexane). In other embodiments, the linker comprises a polyethylene glycol moiety (PEG). In other embodiments, the linker comprises amino acids. In certain embodiments, the linker comprises a peptide. In certain embodiments, the linker comprises an aryl or heteroaryl moiety. In certain embodiments, the linker is based on a phenyl ring. The linker may include functionalized moieties to facilitate attachment of a nucleophile (e.g., thiol, amino) from the peptide to the linker. Any electrophile may be used as part of the linker. Exemplary electrophiles include, but are not limited to, activated esters, activated amides, Michael acceptors, alkyl halides, aryl halides, acyl halides, and isothiocyanates.

[0294] In some embodiments, the linker is an amino acid or a plurality of amino acids (e.g., a peptide or protein). In some embodiments, the linker is a bond e.g., a covalent bond), an organic molecule, group, polymer, or chemical moiety. In some embodiments, the linker is 5-100 amino acids in length, for example, 5, 6, 7, 8, 9, 10, 11, 12, 13, 14, 15, 16, 17, 18, 19, 20, 21, 22, 23, 24, 25, 26, 27, 28, 29, 30, 31, 32, 33, 34, 35-40, 40-45, 45-50, 50-60, 60-70, 70-80, 80-90, 90-100, 100-110, 110-120, 120-130, 130-140, 140-150, or 150-200 amino acids in length. Longer or shorter linkers are also contemplated. In some embodiments, a linker comprises the amino acid sequence SGSETPGTSESATPES (SEQ ID NO: 135), which may also be referred to as the XTEN linker. In some embodiments, the linker is 32 amino acids in length. In some embodiments, the linker comprises the amino acid sequence (SGGS)₂-SGSETPGTSESATPES-(SGGS)₂ (SEQ ID NO: 136), which may also be referred to as (SGGS)₂-XTEN-(SGGS)₂ (SEQ ID NO: 136). In some embodiments, the linker comprises the amino acid sequence, wherein n is 0, 1, 2, 3, 4, 5, 6, 7, 8, 9, or 10. In some embodiments, a linker comprises the amino acid sequence SGGS (SEQ ID NO: 137). In some embodiments, a linker comprises (SGGS)ₙ (SEQ ID NO: 137), (GGGS)ₙ (SEQ ID NO: 138), (GGGGS). (SEQ ID NO: 139), (G). (SEQ ID NO: 140), (EAAAK)ₙ (SEQ ID NO: 141), (SGGS).-SGSETPGTSESATPES-(SGGS)ₙ-(SEQ ID NO: 142), (GGS)ₙ (SEQ ID NO: 143), SGSETPGTSESATPES (SEQ ID NO: 135), or (XP)ₙ (SEQ ID NO: 144) motif, or a combination of any of these, wherein n is independently an integer between 1 and 30, and wherein Xis any amino acid. In some embodiments, n is 1, 2, 3, 4, 5, 6, 7, 8, 9, 10, 11, 12, 13, 14, or 15. In some embodiments, a linker comprises SGSETPGTSESATPES (SEQ ID NO: 135), and SGGS (SEQ ID NO: 137). In some embodiments, a linker comprises SGGSSGSETPGTSESATPESSGGS (SEQ ID NO: 145). In some embodiments, a linker comprises SGGSSGGSSGSETPGTSESATPESSGGSSGGS (SEQ ID NO: 146). In some embodiments, a linker comprises GGSGGSPGSPAGSPTSTEEGTSESATPESGPGTSTEPSEGSAPGSPAGSPTSTEEGTSTE PSEGSAPGTSTEPSEGSAPGTSESATPESGPGSEPATSGGSGGS (SEQ ID NO: 147). In some embodiments, the linker is 24 amino acids in length. In some embodiments, the linker comprises the amino acid sequence SGGSSGGSSGSETPGTSESATPES (SEQ ID NO: 148). In certain embodiments of the disclosed base editors, the linker comprises a sequence that has at least 90%, at least 95%, at least 98%, or at least 99% identity to the sequence of SEQ ID NO: 148.

[0295] In some embodiments, the linker is 40 amino acids in length. In some embodiments, the linker comprises the amino acid sequence SGGSSGGSSGSETPGTSESATPESSGGSSGGSSGGSSGGS (SEQ ID NO: 149). In some embodiments, the linker is 64 amino acids in length. In some embodiments, the linker comprises the amino acid sequence SGGSSGGSSGSETPGTSESATPESSGGSSGGSSGGSSGGSSGSETPGTSESATPESSGGS SGGS (SEQ ID NO: 150). In some embodiments, the linker is 92 amino acids in length. In some embodiments, the linker comprises the amino acid sequence PGSPAGSPTSTEEGTSESATPESGPGTSTEPSEGSAPGSPAGSPTSTEEGTSTEPSEGSAP GTSTEPSEGSAPGTSESATPESGPGSEPATS (SEQ ID NO: 151). It should be appreciated that any of the linkers provided herein may be used to link a first adenosine deaminase and a second adenosine deaminase; an adenosine deaminase (e.g., a first or a second adenosine deaminase) and a napDNAbp; a napDNAbp and an NLS; or an adenosine deaminase (e.g., a first or a second adenosine deaminase) and an NLS.

[0296] In some embodiments, any of the base editors described herein, comprise an adenosine deaminase and a napDNAbp that are fused to each other via a linker. In some embodiments, any of the base editors described herein, comprise a first adenosine deaminase and a second adenosine deaminase that are fused to each other via a linker. In some embodiments, any of the base editors described herein, comprise an NLS, which may be fused to an adenosine deaminase (e.g., a first and/or a second adenosine deaminase), a nucleic acid programmable DNA binding protein (napDNAbp. Various linker lengths and flexibilities between an adenosine deaminase (e.g., an engineered ecTadA) and a napDNAbp (e.g., a Cas9 domain), and/or between a first adenosine deaminase and a second adenosine deaminase can be employed (e.g., ranging from very flexible linkers of the form (GGGGS)ₙ (SEQ ID NO: 138), (GGGGS)ₙ (SEQ ID NO: 139), and (G)ₙ (SEQ ID NO: 140) to more rigid linkers of the form (EAAAK)ₙ (SEQ ID NO: 141), (SGGS)ₙ (SEQ ID NO: 137), SGSETPGTSESATPES (SEQ ID NO: 135) (see, e.g., Guilinger J P, Thompson D B, Liu D R. Fusion of catalytically inactive Cas9 to Fokl nuclease improves the specificity of genome modification. Nat. Biotechnol. 2014; 32(6): 577-82; the entire contents are incorporated herein by reference) and (XP). (SEQ ID NO: 144)) in order to achieve the optimal length for deaminase activity for the specific application. In some embodiments, n is 1, 2, 3, 4, 5, 6, 7, 8, 9, 10, 11, 12, 13, 14, or 15. In some embodiments, the linker comprises a (GGS)ₙ (SEQ ID NO: 152) motif, wherein n is 1, 3, or 7. In some embodiments, the adenosine deaminase and the napDNAbp, and/or the first adenosine deaminase and the second adenosine deaminase of any of the base editors described herein are fused via a linker comprising the amino acid sequence SGSETPGTSESATPES (SEQ ID NO: 135), SGGS (SEQ ID NO: 137), SGGSSGSETPGTSESATPESSGGS (SEQ ID NO: 145), SGGSSGGSSGSETPGTSESATPESSGGSSGGS (SEQ ID NO: 146), or GGSGGSPGSPAGSPTSTEEGTSESATPESGPGTSTEPSEGSAPGSPAGSPTSTEEGTSTE PSEGSAPGTSTEPSEGSAPGTSESATPESGPGSEPATSGGSGGS (SEQ ID NO: 147). In some embodiments, the linker is 24 amino acids in length. In some embodiments, the linker comprises the amino acid sequence SGGSSGGSSGSETPGTSESATPES (SEQ ID NO: 148). In some embodiments, the linker is 32 amino acids in length. In some embodiments, the linker is 32 amino acids in length. In some embodiments, the linker comprises the amino acid sequence (SGGS)₂-SGSETPGTSESATPES-(SGGS)₂ (SEQ ID NO: 136), which may also be referred to as (SGGS)₂-XTEN-(SGGS)₂ (SEQ ID NO: 136). In some embodiments, the linker comprises the amino acid sequence, wherein n is 0, 1, 2, 3, 4, 5, 6, 7, 8, 9, or 10. In some embodiments, the linker is 40 amino acids in length. In some embodiments, the linker comprises the amino acid sequence SGGSSGGSSGSETPGTSESATPESSGGSSGGSSGGSSGGS (SEQ ID NO: 149). In some embodiments, the linker is 64 amino acids in length. In some embodiments, the linker comprises the amino acid sequence SGGSSGGSSGSETPGTSESATPESSGGSSGGSSGGSSGGSSGSETPGTSESATPESSGGS SGGS (SEQ ID NO: 150). In some embodiments, the linker is 92 amino acids in length. In some embodiments, the linker comprises the amino acid sequence PGSPAGSPTSTEEGTSESATPESGPGTSTEPSEGSAPGSPAGSPTSTEEGTSTEPSEGSAP GTSTEPSEGSAPGTSESATPESGPGSEPATS (SEQ ID NO: 151).

### (2) UGI Domain

[0297] In other embodiments, the base editors described herein may comprise one or more uracil glycosylase inhibitors. The term “uracil glycosylase inhibitor” or “UGI,” as used herein, refers to a protein that is capable of inhibiting a uracil-DNA glycosylase base-excision repair enzyme. In some embodiments, a UGI domain comprises a wild-type UGI or a UGI as set forth in SEQ ID NO: 336. In some embodiments, the UGI proteins described herein include fragments of UGI and proteins homologous to a UGI or a UGI fragment. For example, in some embodiments, a UGI domain comprises a fragment of the amino acid sequence set forth in SEQ ID NO: 336. In some embodiments, a UGI fragment comprises an amino acid sequence that comprises at least 60%, at least 65%, at least 70%, at least 75%, at least 80%, at least 85%, at least 90%, at least 95%, at least 96%, at least 97%, at least 98%, at least 99%, or at least 99.5% of the amino acid sequence as set forth in SEQ ID NO: 336. In some embodiments, a UGI comprises an amino acid sequence homologous to the amino acid sequence set forth in SEQ ID NO: 336, or an amino acid sequence homologous to a fragment of the amino acid sequence set forth in SEQ ID NO: 336. In some embodiments, proteins comprising UGI or fragments of UGI or homologs of UGI or UGI fragments are referred to as “UGI variants.” A UGI variant shares homology to UGI, or a fragment thereof. For example a UGI variant is at least 70% identical, at least 75% identical, at least 80% identical, at least 85% identical, at least 90% identical, at least 95% identical, at least 96% identical, at least 97% identical, at least 98% identical, at least 99% identical, at least 99.5% identical, or at least 99.9% identical to a wild type UGI or a UGI as set forth in SEQ ID NO: 336. In some embodiments, the UGI variant comprises a fragment of UGI, such that the fragment is at least 70% identical, at least 80% identical, at least 90% identical, at least 95% identical, at least 96% identical, at least 97% identical, at least 98% identical, at least 99% identical, at least 99.5% identical, or at least 99.9% to the corresponding fragment of wild-type UGI or a UGI as set forth in SEQ ID NO: 336. In some embodiments, the UGI comprises the following amino acid sequence:

### Uracil-DNA Glycosylase Inhibitor:

> splP14739|UNGI_BPPB2
(SEQ ID NO: 336)
MTNLSDIIEKETGKQLVIQESILMLPEEVEEVIGN
KPESDILVHTAYDESTDENVMLLTSDAPEYKPWAL
VIQDSNGENKIKML.

[0299] The base editors described herein may comprise more than one UGI domain, which may be separated by one or more linkers as described herein. It will also be understood that in the context of the herein disclosed base editors, the UGI domain may be linked to a deaminase domain or

### (3) NLS Domains

[0300] In some embodiments, the base editors described herein further comprise one or more nuclear targeting sequences, for example, a nuclear localization sequence (NLS). In some embodiments, a NLS comprises an amino acid sequence that facilitates the importation of a protein, that comprises an NLS, into the cell nucleus (e.g., by nuclear transport). In some embodiments, any of the base editors described herein further comprise one or more nuclear localization sequences (NLSs). In certain embodiments, any of the base editors comprise two NLSs. In some embodiments, one or more of the NLSs are bipartite NLSs (“bpNLS”). In certain embodiments, the disclosed base editors comprise two bipartite NLSs. In some embodiments, the disclosed base editors comprise more than two bipartite NLSs. In particular embodiments, the one or more NLSs of the disclosed base editors comprise the amino acid sequence of MKRTADGSEFESPKKKRKV (SEQ ID NO: 343). In some embodiments, the one or more NLSs of the disclosed base editors comprise an amino acid sequence that differs by 1, 2, 3, or 4 amino acids from the sequence of SEQ ID NO: 343.

[0301] In some embodiments, the NLS is fused to the N-terminus of the base editor. In some embodiments, the NLS is fused to the C-terminus of the base editor. In some embodiments, the NLS is fused to the C-terminus of the napDNAbp. In some embodiments, the NLS is fused to the N-terminus of the adenosine deaminase. In some embodiments, the NLS is fused to the C-terminus of the adenosine deaminase. In some embodiments, the NLS is fused to the base editor via one or more linkers. In some embodiments, the NLS is fused to the base editor without a linker.

[0302] In some embodiments, the base editors described herein do not comprise a linker. In some embodiments, a linker is present between one or more of the domains or proteins (e.g., adenosine deaminase, napDNAbp, and/or NLS). In some embodiments, the “]-[” used in the general architecture above indicates the presence of an optional linker.

[0303] In some embodiments, the general architecture of exemplary base editors with a first adenosine deaminase, a second adenosine deaminase, and a napDNAbp comprises any one of the following structures, where NLS is a nuclear localization sequence (e.g., any NLS provided herein), NH₂ is the N-terminus of the base editor, and COOH is the C-terminus of the base editor.

[0304] In some embodiments, the NLS comprises an amino acid sequence of any one of the NLS sequences provided or referenced herein. Such sequences are well-known in the art and can include the following examples:

| | | SEQUENCE |
|---|---|---|
| DESCRIPTION | SEQUENCE | IDENTIFIER |
| NLS OF SV40 | PKKKRKV | 337 |
| LARGE T-AG | | |
| NLS OF | VSRKRPRP | 338 |
| POLYOMA | | |
| LARGE T-AG | | |
| NLS OF C- | PAAKRVKLD | 339 |
| MYC | | |
| NLS OF TUS- | KLKIKRPVK | 340 |
| PROTEIN | | |
| NLS OF | EGAPPAKRAR | 341 |
| HEPATITIS D | | |
| VIRUS | | |
| ANTIGEN | | |
| NLS OF | PPQPKKKPLDGE | 342 |
| MURINE P53 | | |
| NLS | MKRTADGSEFESPKKKRKV | 343 |
| NLS OF | AVKRPAATKKAGQAKKKKLD | 344 |
| NUCLEOPLASM | | |
| IN | | |
| NLS | SGGSKRTADGSEFEPKKKRKV | 345 |
| NLS OF EGL- | MSRRRKANPTKLSENAKKLAK | 346 |
| 13 | EVEN | |
| NLS | KRTADGSEFEPKKKRKV | 348 |
| NLS | MDSLLMNRRKFLYQFKN | 347 |
| | VRWAKGRRETYLC | |

[0305] In other embodiments, the NLS comprises the amino acid sequence: NLSKRPAAIKKAGQAKKKK (SEQ ID NO: 158), PAAKRVKLD (SEQ ID NO: 339), RQRRNELKRSF (SEQ ID NO: 159), or NQSSNFGPMKGGNFGGRSSGPYGGGGQYFAKPRNQGGY (SEQ ID NO: 160). In exemplary embodiments, the NLS comprises the amino acid sequence of PKKKRKV (SEQ ID NO: 337) or MDSLLMNRRKFLYQFKNVRWAKGRRETYLC (SEQ ID NO: 347).

[0306] A representative nuclear localization signal is a peptide sequence that directs the protein to the nucleus of the cell in which the sequence is expressed. A nuclear localization signal is predominantly basic, can be positioned almost anywhere in a protein's amino acid sequence, generally comprises a short sequence of four amino acids (Autieri & Agrawal, (1998) J. Biol. Chem. 273: 14731-37, incorporated herein by reference) to eight amino acids, and is typically rich in lysine and arginine residues (Magin et al., (2000) Virology 274: 11-16, incorporated herein by reference). Nuclear localization signals often comprise proline residues. A variety of nuclear localization signals have been identified and have been used to effect transport of biological molecules from the cytoplasm to the nucleus of a cell. See, e.g., Tinland et al., (1992) Proc. Natl. Acad. Sci. U.S.A. 89:7442-46; Moede et al., (1999) FEBS Lett. 461:229-34, which is incorporated herein by reference. Translocation is currently thought to involve nuclear pore proteins.

[0307] Most NLSs can be classified in three general groups: (i) a monopartite NLS exemplified by the SV40 large T antigen NLS (PKKKRKV (SEQ ID NO: 337)); (ii) a bipartite motif consisting of two basic domains separated by a variable number of spacer amino acids and exemplified by the Xenopus nucleoplasmin NLS (KRXXXXXXXXXXKKKL (SEQ ID NO: 161)), wherein X is any amino acid; and (iii) noncanonical sequences such as M9 of the hnRNP Al protein, the influenza virus nucleoprotein NLS, and the yeast Gal4 protein NLS (Dingwall and Laskey, Trends Biochem Sci. 1991 Dec; 16(12):478-81).

[0308] Nuclear localization signals appear at various points in the amino acid sequences of proteins. NLSs have been identified at the N-terminus, the C-terminus, and in the central region of proteins. Thus, the specification provides base editors that may be modified with one or more NLSs at the C-terminus, the N-terminus, as well as at an internal region of the base editor. The residues of a longer sequence that do not function as component NLS residues should be selected so as not to interfere, for example tonically or sterically, with the nuclear localization signal itself. Therefore, although there are no strict limits on the composition of an NLS-comprising sequence, in practice, such a sequence can be functionally limited in length and composition.

[0309] The present disclosure contemplates any suitable means by which to modify a base editor (or base editor) to include one or more NLSs. In one aspect, the base editors can be engineered to express a base editor that is translationally fused at its N-terminus or its C-terminus (or both) to one or more NLSs, i.e., to form a base editor-NLS fusion construct. In other embodiments, the base editor-encoding nucleotide sequence can be genetically modified to incorporate a reading frame that encodes one or more NLSs in an internal region of the encoded base editor. In addition, the NLSs may include various amino acid linkers or spacer regions encoded between the base editor and the N-terminally, C-terminally, or internally-attached NLS amino acid sequence. Thus, the present disclosure also provides for nucleotide constructs, vectors, and host cells for expressing base editors that comprise a base editor and one or more NLSs.

[0310] The base editors described herein may also comprise nuclear localization signals which are linked to a base editor through one or more linkers, e.g., polymeric, peptidic, amino acid, polysaccharide, chemical, or nucleic acid linker element. In certain embodiments, the NLS is linked to a base editor using an XTEN linker, as set forth in SEQ ID NO: 148. The linkers within the contemplated scope of the disclosure are not intented to have any limitations and can be any suitable type of molecule (e.g., polymer, amino acid, polysaccharide, nucleic acid, lipid, or any synthetic chemical linker domain) and be joined to the base editor by any suitable strategy that effectuates forming a bond (e.g., covalent linkage, hydrogen bonding) between the base editor and the one or more NLSs.

[0311] The NLS examples above are non-limiting. The disclosed base editors may comprise any known NLS sequence, including any of those described in Cokol et al., “Finding nuclear localization signals,” EMBO Rep., 2000, 1(5): 411-415 and Freitas et al., “Mechanisms and Signals for the Nuclear Import of Proteins,” Current Genomics, 2009, 10(8): 550-7, each of which are incorporated herein by reference.

[0312] In some embodiments, the base editors described herein do not comprise a linker. In some embodiments, a linker is present between one or more of the domains or proteins (e.g., first adenosine deaminase, second adenosine deaminase, napDNAbp, and/or NLS). In some embodiments, the “]-[” used in the general architecture above indicates the presence of an optional linker.

### (4) Split-Intein/Intein Domains

[0313] It will be understood that in some embodiments (e.g., delivery of a base editor in vivo using AAV particles), it may be advantageous to split a polynucleotide encoding a base editor into an N-terminal half and a C-terminal half, deliver N- and C-terminal halves separately, and then allow their colocalization to reform the complete protein (or base editor as the case may be) within the cell. Separate halves of a protein or a base editor may each comprise a split-intein tag to facilitate the reformation of the complete protein or base editor by the mechanism of protein trans splicing.

[0314] Protein trans-splicing, catalyzed by split inteins, provides an entirely enzymatic method for protein ligation. A split-intein is essentially a contiguous intein (e.g. a mini-intein) split into two pieces named N-intein and C-intein, respectively. The N-intein and C-intein of a split intein can associate non-covalently to form an active intein and catalyze the splicing reaction essentially in same way as a contiguous intein does. Split inteins have been found in nature and also engineered in laboratories. As used herein, the term “split intein” refers to any intein in which one or more peptide bond breaks exists between the N-terminal and C-terminal amino acid sequences such that the N-terminal and C-terminal sequences become separate molecules that can non-covalently reassociate, or reconstitute, into an intein that is functional for trans-splicing reactions. Any catalytically active intein, or fragment thereof, may be used to derive a split intein for use in the methods of the invention. For example, in one aspect the split intein may be derived from a eukaryotic intein. In another aspect, the split intein may be derived from a bacterial intein. In another aspect, the split intein may be derived from an archaeal intein. Preferably, the split intein so-derived will possess only the amino acid sequences essential for catalyzing trans-splicing reactions.

[0315] In some aspects of the present disclosure, any of the disclosed base editors are formulated for delivery as two halves. In these embodiments, a composition comprising two polynucleotides (or two vectors) is provided, where the first polynucleotide encodes the N-terminal half of the base editor fused to an N-intein, and the second polynucleotide encodes the C-terminal half of the base editor fused to an C-intein. In some embodiments, the base editor inteins are divided, or “split,” at a site in the napDNAbp domain of the base editor. In some embodiments, the base editor inteins are divided at an amino acid residue within five or fewer positions of residue 574 of the napDNAbp domain. In other embodiments, the base editor inteins are divided at an amino acid residue within give or fewer positions of residue 638 of the napDNAbp domain. In particular embodiments, the base editor inteins are divided at residue 574 or residue 638 of the napDNAbp domain (e.g., an SpCas9 domain). In particular embodiments, each of two split intein halves are fused to each half of a polynucleotide encoding a base editor (e.g., ABE8e, BE4max, or BE4max-VRQR) within the S. pyogenes Cas9 nickase domain (SEQ ID NO: 107) of the base editor immediately before Cys 574 or before Thr 638 (i.e., immediately after residue 573 or after residue 637).

[0316] Exemplary inteins of the disclosure include the Nostoc punctiforme (Npu) intein system. This synthetic intein based on the dnaE intein has been described (see Zettler, J., Schutz, V. & Mootz, H. D., FEBS letters 583, 909-914 (2009), incorporated herein by reference). Accordingly, in particular embodiments, the disclosure provides compositions of a vector encoding a base editor wherein each split DnaE intein half from Nostoc punctiforme (Npu) is fused to each half of a polynucleotide encoding a base editor (e.g., ABE8e, BE4max, or BE4max-VRQR) within the S. pyogenes Cas9 nickase domain (SEQ ID NO: 107) of the base editor immediately before Cys 574 (or immediately after residue 573). Reference is made to Levy et al., Nat Biomed Eng. 2020 Jan; 4(1):97-110.

[0317] In particular embodiments, the disclosure provides compositions of vectors wherein the N-terminal portion of the base editor comprises a portion of any one of SEQ ID NOs: 350-388 that corresponds to amino acids 1-573 of the napDNAbp domain of the base editor. In some embodiments, the disclosure provides compositions of vectors wherein the C-terminal portion of the Cas9 protein comprises a portion of any one of SEQ ID NOs: 350-388 that corresponds to amino acids 574-1368 of the napDNAbp domain. In particular embodiments, the disclosure provides compositions of vectors wherein the N-terminal portion of the base editor comprises a portion of any one of SEQ ID NOs: 350-388 that corresponds to amino acids 1-573 of the Cas9 domain of the base editor and wherein the C-terminal portion of the same base editor comprises a portion of any one of SEQ ID NOs: 350-388 that corresponds to amino acids 574-1368 of the Cas9 domain. In some embodiments, the base editor comprises any of the sequences of SEQ ID NOs: 350 (BE4max), 372 (BE4max-VRQR), 378 (ABE7.10), and 379 (ABE8e).

[0318] Another exemplary split intein is the Ssp DnaE intein, which comprises two subunits, namely, DnaE-N and DnaE-C. The two different subunits are encoded by separate genes, namely dnaE-n and dnaE-c, which encode the DnaE-N and DnaE-C subunits, respectively. DnaE is a naturally occurring split intein in Synechocytis sp. PCC6803 and is capable of directing trans-splicing of two separate proteins, each comprising a fusion with either DnaE-N or DnaE-C. Non-limiting examples of intein pairs that may be used in accordance with the present disclosure include: Cfa DnaE intein, Npu DnaE intein, Ssp GyrB intein, Ssp DnaX intein, Ter DnaE3 intein, Ter ThyX intein, Rma DnaB intein and Cne Prp8 intein (e.g., as described in U.S. Pat. No. 8,394,604, incorporated herein by reference).

[0319] As used herein, the “N-terminal split intein (In)” refers to any intein sequence that comprises an N-terminal amino acid sequence that is functional for trans-splicing reactions. An In thus also comprises a sequence that is spliced out when trans-splicing occurs. An In can comprise a sequence that is a modification of the N-terminal portion of a naturally occurring intein sequence. For example, an In can comprise additional amino acid residues and/or mutated residues so long as the inclusion of such additional and/or mutated residues does not render the In non-functional in trans-splicing. Preferably, the inclusion of the additional and/or mutated residues improves or enhances the trans-splicing activity of the In.

[0320] As used herein, the “C-terminal split intein (Ic)” refers to any intein sequence that comprises a C-terminal amino acid sequence that is functional for trans-splicing reactions. In one aspect, the Ic comprises 4 to 7 contiguous amino acid residues, at least 4 amino acids of which are from the last (3-strand of the intein from which it was derived. An Ic thus also comprises a sequence that is spliced out when trans-splicing occurs. An Ic can comprise a sequence that is a modification of the C-terminal portion of a naturally occurring intein sequence. For example, an Ic can comprise additional amino acid residues and/or mutated residues so long as the inclusion of such additional and/or mutated residues does not render the In non-functional in trans-splicing. Preferably, the inclusion of the additional and/or mutated residues improves or enhances the trans-splicing activity of the Ic.

[0321] Inteins intein-N and intein-C may be fused to the N-terminal portion of the split base editor and the C-terminal portion of the split base editor, respectively, for the joining of the N-terminal portion of the split base editor and the C-terminal portion of the split base editor. For example, in some embodiments, an intein-N is fused to the C-terminus of the N-terminal portion of the split base editor, i.e., to form a structure of N-[N-terminal portion of the split base editor]-[intein-N]-C. In some embodiments, an intein-C is fused to the N-terminus of the C-terminal portion, i.e., to form a structure of N-[intein-C]-[C-terminal portion of the split base editor]-C. The mechanism of intein-mediated protein splicing for joining the proteins the inteins are fused to (e.g., split base editor) is known in the art, e.g., as described in Shah et al., Chem Sci. 2014; 5(1):446-461, incorporated herein by reference.

[0322] Split inteins may be created from contiguous inteins by engineering one or more split sites in the unstructured loop or intervening amino acid sequence between the −12 conserved beta-strands found in the structure of mini-inteins. Some flexibility in the position of the split site within regions between the beta-strands may exist, provided that creation of the split will not disrupt the structure of the intein, the structured beta-strands in particular, to a sufficient degree that protein splicing activity is lost.

[0323] In protein trans-splicing, one precursor protein consists of an N-extein part followed by the N-intein, another precursor protein consists of the C-intein followed by a C-extein part, and a trans-splicing reaction (catalyzed by the N- and C-inteins together) excises the two intein sequences and links the two extein sequences with a peptide bond. Protein trans-splicing, being an enzymatic reaction, can work with very low (e.g., micromolar) concentrations of proteins and can be carried out under physiological conditions.

[0324] Exemplary intein sequences are as follows:

| NAME | SEQUENCE OF INTEIN |
|---|---|
| NPU DNAE N- | CLSYETEILTVEYGLLPIGKIVEKRIECTVYSVDN |
| TERMINAL | NGNIYTQPVAQWHDRGEQEVFEYCLEDGSLIRATK |
| PROTEIN | DHKFMTVDGQMLPIDEIFERELDLMRVDNLPN |
| | (SEQ ID NO: 389) |
| NPU DNAE C- | MIKIATRKYLGKQNVYDIGVERDHNFALKNG |
| TERMINAL | FIASN |
| PROTEIN | (SEQ ID NO: 390) |
| CFA-N | CLSYDTEILTVEYGFLPIGKIVEERIECTVYTVDK |
| PROTEIN: | NGFVYTQPIAQWHNRGEQEVFEYCLEDGSIIRATK |
| | DHKFMTTDGQMLPIDEIFERGLDLKQVDGLP |
| | (SEQ ID NO: 391) |
| CFA-C | MKRTADGSEFESPKKKRKVKIISRKSLGTQNVYDI |
| PROTEIN: | GVEKDHNFLLKNGLVASN (SEQ ID NO: 392) |

[0325] Although inteins are most frequently found as a contiguous domain, some exist in a naturally split form. In this case, the two fragments are expressed as separate polypeptides and must associate before splicing takes place, so-called protein trans-splicing.

[0326] Additional naturally occurring or engineered split-intein sequences are known in the or can be made from whole-intein sequences described herein or those available in the art. Examples of split-intein sequences can be found in Stevens et al., “A promiscuous split intein with expanded protein engineering applications,” PNAS, 2017, Vol.114: 8538-8543; Iwai et al., Highly efficient protein trans-splicing by a naturally split DnaE intein from Nostc punctiforme, FEBS Lett, 580: 1853-1858, each of which are incorporated herein by reference. Additional split intein sequences can be found, for example, in WO 2013/045632, WO 2014/055782, WO 2016/069774, and EP2877490, the contents each of which are incorporated herein by reference.

[0327] In addition, protein splicing in trans has been described in vivo and in vitro (Shingledecker, et al., Gene 207:187 (1998), Southworth, et al., EMBO J. 17:918 (1998); Mills, et al., Proc. Natl. Acad. Sci. USA, 95:3543-3548 (1998); Lew, et al., J. Biol. Chem., 273:15887-15890 (1998); Wu, et al., Biochim. Biophys. Acta 35732:1 (1998b), Yamazaki, et al., J. Am. Chem. Soc. 120:5591 (1998), Evans, et al., J. Biol. Chem. 275:9091 (2000); Otomo, et al., Biochemistry 38:16040-16044 (1999); Otomo, et al., J. Biolmol. NMR 14:105-114 (1999); Scott, et al., Proc. Natl. Acad. Sci. USA 96:13638-13643 (1999)) and provides the opportunity to express a protein as to two inactive fragments that subsequently undergo ligation to form a functional product.

### Exemplary Base Editors

[0328] In various aspects, the instant specification provides base editors and methods of using the same to treat Usher syndrome . In particular, the inventors surprisingly found that adenosine base editors could be used to efficiently mutate specific residues of the USH2A gene both in vitro and in vivo, which is useful for the treatment of certain Usher syndrome and retinitis pigmentosa.

[0329] In certain aspects, methods provided herein utilize base editors (e.g., adenosine base editors) known in the art in order to make one or more desired nucleic acid modifications. The state of the art has described numerous base editors as of this filing. The methods and approaches herein described may be applied to any previously known base editor, or to base editors that may be developed in the future. Exemplary base editors that may be used in accordance with the present disclosure include those described in the following references and/or patent publications, each of which are incorporated by reference in their entireties: in Rees & Liu, Nat Rev Genet. 2018; 19(12):770-788 and Koblan et al., Nat Biotechnol. 2018; 36(9):843-846; as well as.U.S. Patent Publication No. 2018/0073012, published Mar. 15, 2018, which issued as U.S. Pat. No. 10,113,163; on Oct. 30, 2018; U.S. Patent Publication No. 2017/0121693, published May 4, 2017, which issued as U.S. Pat. No. 10,167,457 on Jan. 1, 2019; International Publication No. WO 2017/070633, published Apr. 27, 2017; U.S. Patent Publication No. 2015/0166980, published Jun. 18, 2015; U.S. Pat. No. 9,840,699, issued Dec. 12, 2017; U.S. Pat. No. 10,077,453, issued Sep. 18, 2018; International Publication No. WO 2019/023680, published Jan. 31, 2019; International Application No. PCT/US2019/033848, filed May 23, 2019, which published as Publication No. WO 2019/226593 on Nov. 28, 2019; International Publication No. WO 2018/0176009, published Sep. 27, 2018, International Publication No. WO 2020/041751, published Feb. 27, 2020; International Publication No. WO 2020/051360, published Mar. 12, 2020; International Patent Publication No. WO 2020/102659, published May 22, 2020; International Publication No. WO 2020/086908, published Apr. 30, 2020; International Publication No. WO 2020/181180, published Sep. 10, 2020; International Publication No. WO 2020/214842, published Oct. 22, 2020; International Publication No. WO 2020/092453, published May 7, 2020; International Publication No. WO2020/236982, published Nov. 26, 2020; International Application No. PCT/US2020/624628, filed Nov. 25, 2020, and International Application No. PCT/US2021/016827, filed Feb. 5, 2021.

[0330] In various aspects, the improved or modified base editors described herein have the following generalized structure:

[0331] A-B-C,

wherein “A” is a Cas moiety or napDNA/RNAbp, “B” is nucleic acid effector domain (e.g., an adenosine deaminase), and “C” is one or more nuclear localization signals (NLS). In addition, the “-” represents a linker that covalently joins moieties A, B, and C. The linkers can be any suitable type (e.g., amino acid sequences or other biopolymers, or synthetic chemical linkages in the case where the moieties are bioconjugated to one another) or length. In addition, a functional base editor of the invention would also include one or more “R” or guide sequences (e.g., guide RNA in the case of a Cas9 or Cas9 equivalent) in order to carry out the DNA/RNA-programmable functionality of base editors for targeting specific sites to be corrected.

[0332] The order of linkage of the moieties is not meant to be particularly limiting so long as the particular arrangement of the elements of moieties produces a functional base editor. That is, the improved base editors of the invention may also include editors represented by the following structures:

[0333] B-A-C;

[0334] B-C-A;

[0335] C-B-A;

[0336] C-A-B; and

[0337] A-C-B.

[0338] In some embodiments, the base editors described herein can be made as a recombinant base editor comprising one or more protein domains, thereby generating a base editor. In certain embodiments, the base editors described herein comprise one or more features that improve the base editing activity (e.g., efficiency, selectivity, and/or specificity) of the base editor proteins. For example, the base editors described herein may comprise a Cas9 domain that has reduced nuclease activity. In some embodiments, the base editors described herein may have a Cas9 domain that does not have nuclease activity (dCas9), or a Cas9 domain that cuts one strand of a duplexed DNA molecule, referred to as a Cas9 nickase (nCas9). Without wishing to be bound by any particular theory, the presence of the catalytic residue (e.g., H840) maintains the activity of the Cas9 to cleave the non-edited (e.g., non-deaminated) strand containing a T opposite the targeted A. Mutation of the catalytic residue (e.g., D10 to A10) of Cas9 prevents cleavage of the edited strand containing the targeted A residue. Such Cas9 variants are able to generate a single-strand DNA break (nick) at a specific location based on the gRNA-defined target sequence, leading to repair of the non-edited strand, ultimately resulting in a T to C change on the non-edited strand.

[0339] In particular, the disclosure provides adenosine base editors that can be used to disrupt a splice site or introduce a point mutation in the human USH2A gene. Exemplary domains used in base editors, including adenosine deaminases, napDNA/RNAbp (e.g., Cas9), and nuclear localization sequences (NLSs) are described in further detail below. Some aspects of the disclosure provide base editors comprising a nucleic acid programmable DNA binding protein (napDNAbp) and a deaminase (e.g., adenosine or cytidine deaminase). In some embodiments, any of the base editors described herein is a base editor. In some embodiments, the napDNAbp is a Cas9 domain, a Cpf 1 domain, a CasX domain, a CasY domain, a C2c1 domain, a C2c2 domain, aC2c3 domain, or an Argonaute domain. In some embodiments, the napDNAbp is any napDNAbp described herein. Some aspects of the disclosure provide base editors comprising a Cas9 domain and a deaminase (e.g., an adenosine or cytidine deaminase). The Cas9 domain may be any of the Cas9 domains or Cas9 proteins (e.g., dCas9 or nCas9) provided herein. In some embodiments, any of the Cas9 domains or Cas9 proteins (e.g., dCas9 or nCas9) provided herein may be fused with any of the deaminases (e.g., adenosine or cytidine deaminases) provided herein. In some embodiments, the base editor comprises the structure:

[0340] NH₂-[deaminase]-[napDNAbp]-COOH; or

[0341] NH₂-[napDNAbp][deaminase]-COOH

[0342] In some embodiments, the base editors comprising an adenosine deaminase and a napDNAbp (e.g., Cas9 domain) do not include a linker sequence. In some embodiments, a linker is present between the adenosine deaminase domain and the napDNAbp. In some embodiments, the “-” used in the general architecture above indicates the presence of an optional linker. In some embodiments, the adenosine deaminase and the napDNAbp are fused via any of the linkers provided herein. For example, in some embodiments the adenosine deaminase and the napDNAbp are fused via any of the linkers provided above in the section entitled “Linkers”. In some embodiments, the adenosine deaminase and the napDNAbp are fused via a linker that comprises between 1 and 200 amino acids. In some embodiments, the adenosine deaminase and the napDNAbp are fused via a linker that comprises from 1 to 5, 1 to 10, 1 to 20, 1 to 30, 1 to 40, 1 to 50, 1 to 60, 1 to 80, 1 to 100, 1 to 150, 1 to 200, 5 to 10, 5 to 20, 5 to 30, 5 to 40, 5 to 60, 5 to 80, 5 to 100, 5 to 150, 5 to 200, 10 to 20, 10 to 30, 10 to 40, 10 to 50, 10 to 60, 10 to 80, 10 to 100, 10 to 150, 10 to 200, 20 to 30, 20 to 40, 20 to 50, 20 to 60, 20 to 80, 20 to 100, 20 to 150, 20 to 200, 30 to 40, 30 to 50, 30 to 60, 30 to 80, 30 to 100, 30 to 150, 30 to 200, 40 to 50, 40 to 60, 40 to 80, 40 to 100, 40 to 150, 40 to 200, 50 to 60 50 to 80, 50 to 100, 50 to 150, 50 to 200, 60 to 80, 60 to 100, 60 to 150, 60 to 200, 80 to 100, 80 to 150, 80 to 200, 100 to 150, 100 to 200, or 150 to 200 amino acids in length. In some embodiments, the adenosine deaminase and the napDNAbp are fused via a linker that comprises 3, 4, 16, 24, 32, 64, 100, or 104 amino acids in length. In some embodiments, the adenosine deaminase and the napDNAbp are fused via a linker that comprises the amino acid sequence of SGSETPGTSESATPES (SEQ ID NO: 135), SGGS (SEQ ID NO: 137), SGGSSGSETPGTSESATPESSGGS (SEQ ID NO: 145), SGGSSGGSSGSETPGTSESATPESSGGSSGGS (SEQ ID NO: 146), or GGSGGSPGSPAGSPTSTEEGTSESATPESGPGTSTEPSEGSAPGSPAGSPTSTEEGTSTE PSEGSAPGTSTEPSEGSAPGTSESATPESGPGSEPATSGGSGGS (SEQ ID NO: 147). In some embodiments, the adenosine deaminase and the napDNAbp are fused via a linker comprising the amino acid sequence SGSETPGTSESATPES (SEQ ID NO: 135), which may also be referred to as the XTEN linker. In some embodiments, the linker is 24 amino acids in length. In some embodiments, the linker comprises the amino acid sequence SGGSSGGSSGSETPGTSESATPES (SEQ ID NO: 148). In some embodiments, the linker is 32 amino acids in length. In some embodiments, the linker comprises the amino acid sequence (SGGS)₂-SGSETPGTSESATPES-(SGGS)₂ (SEQ ID NO: 136), which may also be referred to as (SGGS)₂-XTEN-(SGGS)₂ (SEQ ID NO: 136). In some embodiments, the linker comprises the amino acid sequence (SGGS).-SGSETPGTSESATPES-(SGGS), (SEQ ID NO: 142), wherein n is 0, 1, 2, 3, 4, 5, 6, 7, 8, 9, or 10. In some embodiments, the linker is 40 amino acids in length. In some embodiments, the linker comprises the amino acid sequence SGGSSGGSSGSETPGTSESATPESSGGSSGGSSGGSSGGS (SEQ ID NO: 149). In some embodiments, the linker is 64 amino acids in length. In some embodiments, the linker comprises the amino acid sequence SGGSSGGSSGSETPGTSESATPESSGGSSGGSSGGSSGGSSGSETPGTSESATPESSGGS SGGS (SEQ ID NO: 150). In some embodiments, the linker is 92 amino acids in length. In some embodiments, the linker comprises the amino acid sequence PGSPAGSPTSTEEGTSESATPESGPGTSTEPSEGSAPGSPAGSPTSTEEGTSTEPSEGSAP GTSTEPSEGSAPGTSESATPESGPGSEPATS (SEQ ID NO: 151).

[0343] In other embodiments, the base editors comprising an cytidine deaminase and a napDNAbp (e.g., Cas9 domain) do not include a linker sequence. In some embodiments, a linker is present between the cytidine deaminase domain and the napDNAbp. In some embodiments, the “-” used in the general architecture above indicates the presence of an optional linker. In some embodiments, the cytidine deaminase and the napDNAbp are fused via any of the linkers provided herein. For example, in some embodiments the cytidine deaminase and the napDNAbp are fused via any of the linkers provided above in the section entitled “Linkers”. In some embodiments, the cytidine deaminase and the napDNAbp are fused via a linker that comprises between 1 and 200 amino acids. In some embodiments, the cytidine deaminase and the napDNAbp are fused via a linker that comprises from 1 to 5, 1 to 10, 1 to 20, 1 to 30, 1 to 40, 1 to 50, 1 to 60, 1 to 80, 1 to 100, 1 to 150, 1 to 200, 5 to 10, 5 to 20, 5 to 30, 5 to 40, 5 to 60, 5 to 80, 5 to 100, 5 to 150, 5 to 200, 10 to 20, 10 to 30, 10 to 40, 10 to 50, 10 to 60, 10 to 80, 10 to 100, 10 to 150, 10 to 200, 20 to 30, 20 to 40, 20 to 50, 20 to 60, 20 to 80, 20 to 100, 20 to 150, 20 to 200, 30 to 40, 30 to 50, 30 to 60, 30 to 80, 30 to 100, 30 to 150, 30 to 200, 40 to 50, 40 to 60, 40 to 80, 40 to 100, 40 to 150, 40 to 200, 50 to 60 50 to 80, 50 to 100, 50 to 150, 50 to 200, 60 to 80, 60 to 100, 60 to 150, 60 to 200, 80 to 100, 80 to 150, 80 to 200, 100 to 150, 100 to 200, or 150 to 200 amino acids in length.

[0344] In some embodiments, the base editors described herein further comprise one or more nuclear targeting sequences, for example, a nuclear localization sequence (NLS). In some embodiments, a NLS comprises an amino acid sequence that facilitates the importation of a protein, that comprises an NLS, into the cell nucleus (e.g., by nuclear transport). In some embodiments, any of the base editors described herein further comprise a nuclear localization sequence (NLS). In some embodiments, the NLS is fused to the N-terminus of the base editor. In some embodiments, the NLS is fused to the C-terminus of the base editor. In some embodiments, the NLS is fused to the N-terminus of the napDNAbp. In some embodiments, the NLS is fused to the C-terminus of the napDNAbp. In some embodiments, the NLS is fused to the N-terminus of the adenosine deaminase. In some embodiments, the NLS is fused to the C-terminus of the adenosine deaminase. In some embodiments, the NLS is fused to the base editor via one or more linkers. In some embodiments, the NLS is fused to the base editor without a linker. In some embodiments, the NLS comprises an amino acid sequence of any one of the NLS sequences provided or referenced herein. In some embodiments, the NLS comprises an amino acid sequence as set forth in any one of SEQ ID NOs: 30-33. Additional nuclear localization sequences are known in the art and would be apparent to the skilled artisan. For example, NLS sequences are described in Plank et al., PCT/EP2000/011690, the contents of which are incorporated herein by reference for their disclosure of exemplary nuclear localization sequences.

[0345] In some embodiments, the general architecture of exemplary base editors with an adenosine deaminase and a napDNAbp comprises any one of the following structures, where NLS is a nuclear localization sequence (e.g., any NLS provided herein), NH₂ is the N-terminus of the base editor, and COOH is the C-terminus of the base editor. Base editors comprising an adenosine deaminase, a napDNAbp, and a NLS:

[0346] NH₂-[NLS]-[deaminase]-[napDNAbp]-COOH;

[0347] NH₂-[deaminase]-[NLS]-[napDNAbp]-COOH;

[0348] NH₂-[deaminase]-[napDNAbp]-[NLS]-COOH;

[0349] NH₂-[NLS]-[napDNAbp]-[deaminase]-COOH;

[0350] NH₂-[napDNAbp]-[NLS]-[deaminase]-COOH; and

[0351] NH₂-[napDNAbp][deaminase]-[NLS]-COOH.

[0352] In some embodiments, the base editors described herein do not comprise a linker. In some embodiments, a linker is present between one or more of the domains or proteins (e.g., cytidine deaminase or adenosine deaminase domain, napDNAbp domain, and/or NLS). In some embodiments, the “]-[” used in the general architecture above indicates the presence of an optional linker.

[0353] In certain embodiments, the disclosed adenine base editors comprise an ABE7.10 or ABE8 architecture, which comprises NH₂-[NLS]-[first adenosine deaminase]-[second adenosine deaminase]-[napDNAbp]-[NLS]-COOH. In certain embodiments, the disclosed adenine base editors comprise an ABE8 monomer architecture, which comprises NH₂-[NLS]-[adenosine deaminase]-[napDNAbp]-[NLS]-COOH. In SOME embodiments, the disclosed cytidine base editors comprise an BE4 architecture, which comprises NH₂-[NLS]-[cytidine deaminase]-[napDNAbp]-[NLS]-COOH.

[0354] In some embodiments, the base editors described herein further comprise one or more nuclear targeting sequences, for example, a nuclear localization sequence (NLS). In some embodiments, a NLS comprises an amino acid sequence that facilitates the importation of a protein, that comprises an NLS, into the cell nucleus (e.g., by nuclear transport). In some embodiments, any of the base editors described herein further comprise one or more nuclear localization sequences (NLSs). In certain embodiments, any of the base editors comprise two NLSs. In some embodiments, one or more of the NLSs are bipartite NLSs (“bpNLS”). In certain embodiments, the disclosed base editors comprise two bipartite NLSs. In some embodiments, the disclosed base editors comprise more than two bipartite NLSs.

[0355] In some embodiments, the NLS is fused to the N-terminus of the base editor. In some embodiments, the NLS is fused to the C-terminus of the base editor. In some embodiments, the NLS is fused to the C-terminus of the napDNAbp. In some embodiments, the NLS is fused to the N-terminus of the adenosine deaminase. In some embodiments, the NLS is fused to the C-terminus of the adenosine deaminase. In some embodiments, the NLS is fused to the base editor via one or more linkers. In some embodiments, the NLS is fused to the base editor without a linker.

[0356] In some embodiments, the NLS comprises an amino acid sequence of any one of the NLS sequences provided or referenced herein. In some embodiments, the NLS comprises an amino acid sequence as set forth in SEQ ID NO: 337 or SEQ ID NO: 347.

[0357] The base editors described herein also may include one or more additional elements. In certain embodiments, an additional element may comprise an effector of base repair, such as an inhibitor of base repair.

[0358] In some embodiments, the base editors described herein may comprise one or more heterologous protein domains (e.g., about or more than about 1, 2, 3, 4, 5, 6, 7, 8, 9, 10, or more domains in addition to the base editors components). A base editor may comprise any additional protein sequence, and optionally a linker sequence between any two domains. Other exemplary features that may be present are localization sequences, such as cytoplasmic localization sequences, export sequences, such as nuclear export sequences, or other localization sequences, as well as sequence tags.

[0359] Examples of heterologous protein domains that may be fused to a base editor or component thereof (e.g., the napDNAbp domain, the nucleotide modification domain, or the NLS domain) include, without limitation, epitope tags and reporter gene sequences. Non-limiting examples of epitope tags include histidine (His) tags, V5 tags, FLAG tags, influenza hemagglutinin (HA) tags, Myc tags, VSV-G tags, and thioredoxin (Trx) tags. Examples of reporter genes include, but are not limited to, glutathione-5-transferase (GST), horseradish peroxidase (HRP), chloramphenicol acetyltransferase (CAT), beta-galactosidase, beta-glucuronidase, luciferase, green fluorescent protein (GFP), HcRed, DsRed, cyan fluorescent protein (CFP), yellow fluorescent protein (YFP), and autofluorescent proteins including blue fluorescent protein (BFP). A base editor may be fused to a gene sequence encoding a protein or a fragment of a protein that binds DNA molecules or binds other cellular molecules, including, but not limited to, maltose binding protein (MBP), S-tag, Lex A DNA binding domain (DBD) fusions, GAL4 DNA binding domain fusions, and herpes simplex virus (HSV) BP16 protein fusions. Additional domains that may form part of a base editor are described in US Patent Publication No. 2011/0059502, published Mar. 10, 2011, and incorporated herein by reference in its entirety.

[0360] In an aspect of the disclosure, a reporter gene which includes, but is not limited to, glutathione-5-transferase (GST), horseradish peroxidase (HRP), chloramphenicol acetyltransferase (CAT) beta-galactosidase, beta-glucuronidase, luciferase, green fluorescent protein (GFP), HcRed, DsRed, cyan fluorescent protein (CFP), yellow fluorescent protein (YFP), and autofluorescent proteins including blue fluorescent protein (BFP), may be introduced into a cell to encode a gene product which serves as a marker by which to measure the alteration or modification of expression of the gene product. In certain embodiments of the disclosure the gene product is luciferase. In a further embodiment of the disclosure the expression of the gene product is decreased.

[0361] Other exemplary features that may be present are tags that are useful for solubilization, purification, or detection of the base editor. Suitable protein tags provided herein include, but are not limited to, biotin carboxylase carrier protein (BCCP) tags, myc-tags, calmodulin-tags, FLAG-tags, hemagglutinin (HA)-tags, bgh-PolyA tags, polyhistidine tags, and also referred to as histidine tags or His-tags, maltose binding protein (MBP)-tags, nus-tags, glutathione-S-transferase (GST)-tags, green fluorescent protein (GFP)-tags, thioredoxin-tags, S-tags, Softags (e.g., Softag 1, Softag 3), strep-tags , biotin ligase tags, FlAsH tags, V5 tags, and SBP-tags. Additional suitable sequences will be apparent to those of skill in the art. In some embodiments, the base editor comprises one or more His tags.

### Exemplary ABEs

[0362] In some aspects, the base editing methods of the disclosure comprise the use of an adenine base editor. Exemplary adenine base editors include, but are not limited to, ABE7.10 (or ABEmax), ABE8e, ABE8e-SaKKH, ABE8e-NG, ABE-xCas9, ABE7.10-SaKKH, ABE7.10-NG, ABE7.10-VRQR, ABE7.10-VQR, ABE8e-NRTH, ABE8e-NRRH, ABE8e-VQR, or ABE8e-VRQR. In certain embodiments, the adenine base editor used in the disclosed methods is an ABE8e or an ABE7.10. ABE8e may be referred to herein as “ABE8” or “ABE8.0”. The ABE8e base editor and variants thereof may comprise an adenosine deaminase domain containing a TadA-8e adenosine deaminase monomer (monomer form) or a TadA-8e adenosine deaminase homodimer or heterodimer (dimer form). Other ABEs may be used to deaminate an A nucleobase in accordance with the disclosed methods.

[0363] In some aspects, the disclosure provides complexes of adenine base editors and guide RNAs. Exemplary adenine base editors of the disclosed complexes include, but are not limited to, ABE7.10 (or ABEmax), ABE8e, ABE8e-SaKKH, ABE8e-NG, ABE-xCas9, ABE7.10-SaKKH, ABE7.10-NG, ABE7.10-VRQR, ABE7.10-VQR, ABE8e-NRTH, ABE8e-NRRH, ABE8e-VQR, or ABE8e-VRQR. In certain embodiments, the adenine base editor of any of the disclosed complexes is a ABE8e or an ABE7.10. Other ABEs may be used to deaminate a A nucleobase in accordance with the disclosed complexes.

[0364] The disclosed complexes of ABEs may possess an on-target editing efficiency of more than 50% after being contacted with a nucleic acid molecule comprising a target sequence. Further exemplary ABE complexes possess an on-target editing efficiency of more than 60% after being contacted with a nucleic acid molecule comprising a target sequence. Further exemplary ABEs possess an on-target editing efficiency of more than 65%, more than 70%, more than 75%, more than 80%, more than 82.5%, or more than 85% after being contacted with a nucleic acid molecule comprising a target sequence. The disclosed ABE complexes may exhibit indel frequencies of less than 0.75%, less than 0.6%, less than 0.5%, less than 0.4%, less than 0.3%, or less than 0.2% after being contacted with a nucleic acid molecule containing a target sequence.

[0365] Some aspects of the disclosure provide base editors that comprise a nucleic acid programmable DNA binding protein (napDNAbp) and at least two adenosine deaminase domains. Without wishing to be bound by any particular theory, dimerization of adenosine deaminases (e.g., in cis or in trans) may improve the ability (e.g., efficiency) of the base editor to modify a nucleic acid base, for example to deaminate adenine. In some embodiments, any of the base editors may comprise 2, 3, 4 or 5 adenosine deaminase domains. In some embodiments, any of the base editors described herein comprises two adenosine deaminases. In some embodiments, any of the base editors described herein contains only two adenosine deaminases. In some embodiments, the adenosine deaminases are the same. In some embodiments, the adenosine deaminases are any of the adenosine deaminases described herein. In some embodiments, the adenosine deaminases are different.

[0366] In some embodiments, the first adenosine deaminase is any of the adenosine deaminases described herein, and the second adenosine is any of the adenosine deaminases described herein, but is not identical to the first adenosine deaminase. As one example, the base editor may comprise a first adenosine deaminase and a second adenosine deaminase that both comprise the amino acid sequence of SEQ ID NO: 10, which contains a W23R; H36L; P48A; R51L; L84F; A106V; D108N; H123Y; S146C; D147Y; R152P; E155V; I156F; and K157N mutation from ecTadA (SEQ ID NO: 1). In some embodiments, the base editor may comprise a first adenosine deaminase that comprises the amino acid sequence of SEQ ID NO: 1, and a second adenosine deaminase domain that comprises the amino acid sequence of TadA7.10 of SEQ ID NO: 10. In certain embodiments, the first and/or second deaminase is a TadA-8e deaminase. Additional base editor constructs comprising two adenosine deaminase domains are illustrated herein and are provided in the art.

[0367] In some embodiments, the base editor comprises two adenosine deaminases (e.g., a first adenosine deaminase and a second adenosine deaminase). In some embodiments, the base editor comprises a first adenosine deaminase and a second adenosine deaminase. In some embodiments, the first adenosine deaminase is N-terminal to the second adenosine deaminase in the base editor. In some embodiments, the first adenosine deaminase is C-terminal to the second adenosine deaminase in the base editor. In some embodiments, the first adenosine deaminase and the second deaminase are fused directly or via a linker. In some embodiments, the linker is any of the linkers provided herein, for example, any of the linkers described in the “Linkers” section. In some embodiments, the linker comprises the amino acid sequence of any one of SEQ ID NOs: 135-152. In some embodiments, the linker is 32 amino acids in length. In some embodiments, the linker comprises the amino acid sequence (SGGS)₂-SGSETPGTSESATPES-(SGGS)₂ (SEQ ID NO: 136), which may also be referred to as (SGGS)₂-XTEN-(SGGS)₂ (SEQ ID NO: 136). In some embodiments, the linker comprises the amino acid sequence (SGGS).-SGSETPGTSESATPES-(SGGS)ₙ (SEQ ID NO: 142), wherein n is 0, 1, 2, 3, 4, 5, 6, 7, 8, 9, or 10. In some embodiments, the first adenosine deaminase is the same as the second adenosine deaminase. In some embodiments, the first adenosine deaminase and the second adenosine deaminase are any of the adenosine deaminases described herein. In some embodiments, the first adenosine deaminase and the second adenosine deaminase are different. In some embodiments, the first adenosine deaminase is any of the adenosine deaminases described herein. In some embodiments, the second adenosine deaminase is any of the adenosine deaminases described herein but is not identical to the first adenosine deaminase. In some embodiments, the first adenosine deaminase is an ecTadA adenosine deaminase. In some embodiments, the first adenosine deaminase comprises an amino acid sequence that is at least 60%, at least 65%, at least 70%, at least 75%, at least 80%, at least 85%, at least 90%, at least 95%, at least 96%, at least 97%, at least 98%, at least 99%, or at least 99.5% identical to any one of the amino acid sequences set forth in any one of SEQ ID NOs: 1-10, or to any of the adenosine deaminases described herein. In some embodiments, the first adenosine deaminase comprises the amino acid sequence of SEQ ID NO: 1. In some embodiments, the second adenosine deaminase comprises an amino acid sequence that is at least 60%, at least 65%, at least 70%, at least 75%, at least 80%, at least 85%, at least 90%, at least 95%, at least 96%, at least 97%, at least 98%, at least 99%, or at least 99.5% identical to any one of the amino acid sequences set forth in any one of SEQ ID NOs: 1-10, or to any of the adenosine deaminases described herein. In some embodiments, the second adenosine deaminase comprises the amino acid sequence of SEQ ID NO: 10.

[0368] In some embodiments, exemplary ABEs for use in the present disclosure include those from Gaudelli et al. Nature Biotechnology (2020) 38, 892-900, and International Patent Pub. No. WO 2020/231863, published Nov. 19, 2020, each of which is incorporated by reference herein. These base editors include, but are not limited to, a base editor comprising a sequence that is at least 90%, at least 95%, at least 98%, at least 99%, or at least 99.5% identical to the sequences reported therein for base editors ABE8.8-m, ABE8.13-m, ABE8.17-m, ABE8.20-m, ABE8.8d, ABE8.13-m, ABE8.17-d, and ABE8.20-d.

[0369] In some embodiments, exemplary ABEs for use in the present disclosure include those provided in WO 2020/051562, published Mar. 12, 2020, which discloses multi-effector cytosine base editors having two napDNAbp domains (dCas9 and Cas9n), adenosine deaminase domain and and a UGI domain. In some embodiments, exemplary ABEs for use in the present disclosure include those provided in WO 2020/028823, published Feb. 6, 2020, which discloses multi-effector base editors having a pmCDA cytidine deaminase domain, a TadA7.10 adenosine deaminase domain, a UGI domain, and a Cas9n domain. Each of these publications is incorporated herein by reference.

[0370] In some embodiments, the general architecture of exemplary base editors with a first adenosine deaminase, a second adenosine deaminase, and a napDNAbp comprises any one of the following structures, where NLS is a nuclear localization sequence (e.g., any NLS provided herein), NH₂ is the N-terminus of the base editor, and COOH is the C-terminus of the base editor.

[0371] Base editors comprising a first adenosine deaminase, a second adenosine deaminase, and a napDNAbp. NH₂-[first adenosine deaminase]-[second adenosine deaminase]-[napDNAbp]-COOH; NH₂-[first adenosine deaminase]-[napDNAbp]-[second adenosine deaminase]-COOH; NH₂-[napDNAbp]-[first adenosine deaminase]-[second adenosine deaminase]-COOH; NH₂-[second adenosine deaminase]-[first adenosine deaminase]-[napDNAbp]-COOH; NH₂-[second adenosine deaminase]-[napDNAbp]-[first adenosine deaminase]-COOH; NH₂-[napDNAbp]-[second adenosine deaminase]-[first adenosine deaminase]-COOH.

[0372] In some embodiments, the base editors described herein do not comprise a linker. In some embodiments, a linker is present between one or more of the domains or proteins (e.g., first adenosine deaminase, second adenosine deaminase, and/or napDNAbp). In some embodiments, the “]-[” used in the general architecture above indicates the presence of an optional linker.

[0373] Base editors comprising a first adenosine deaminase, a second adenosine deaminase, a napDNAbp, and an NLS. NH₂-[NLS]-[first adenosine deaminase]-[second adenosine deaminase]-[napDNAbp]-COOH; NH₂-[first adenosine deaminase]-[NLS]-[second adenosine deaminase]-[napDNAbp]-COOH; NH₂-[first adenosine deaminase]-[second adenosine deaminase]-[NLS]-[napDNAbp]-COOH; NH₂-[first adenosine deaminase]-[second adenosine deaminase]-[napDNAbp]-[NLS]-COOH; NH₂-[NLS]-[first adenosine deaminase]-[napDNAbp]-[second adenosine deaminase]-COOH; NH₂-[first adenosine deaminase]-[NLS]-[napDNAbp]-[second adenosine deaminase]-COOH; NH₂-[first adenosine deaminase]-[napDNAbp]-[NLS]-[second adenosine deaminase]-COOH; NH₂-[first adenosine deaminase]-[napDNAbp]-[second adenosine deaminase]-[NLS]-COOH; NH₂-[NLS]-[napDNAbp]-[first adenosine deaminase]-[second adenosine deaminase]-COOH; NH₂-[napDNAbp]-[NLS ]-[first adenosine deaminase]-[second adenosine deaminase]-COOH; NH₂-[napDNAbp]-[first adenosine deaminase]-[NLS]-[second adenosine deaminase]-COOH; NH₂-[napDNAbp]-[first adenosine deaminase]-[second adenosine deaminase]-[NLS ]-COOH; NH₂-[NLS]-[second adenosine deaminase]-[first adenosine deaminase]-[napDNAbp]-COOH; NH₂-[second adenosine deaminase]-[NLS]-[first adenosine deaminase]-[napDNAbp]-COOH; NH₂-[second adenosine deaminase]-[first adenosine deaminase]-[NLS]-[napDNAbp]-COOH; NH₂-[second adenosine deaminase]-[first adenosine deaminase]-[napDNAbp]-[NLS]-COOH; NH₂-[NLS]-[second adenosine deaminase]-[napDNAbp]-[first adenosine deaminase]-COOH; NH₂-[second adenosine deaminase]-[NLS ]-[napDNAbp]-[first adenosine deaminase]-COOH; NH₂-[second adenosine deaminase]-[napDNAbp]-[NLS ]-[first adenosine deaminase]-COOH; NH₂-[second adenosine deaminase]-[napDNAbp]-[first adenosine deaminase]-[NLS]-COOH; NH₂-[NLS]-[napDNAbp]-[second adenosine deaminase]-[first adenosine deaminase]-COOH; NH₂-[napDNAbp]-[NLS ]-[second adenosine deaminase]-[first adenosine deaminase]-COOH; NH₂-[napDNAbp]-[second adenosine deaminase]-[NLS]-[first adenosine deaminase]-COOH; NH₂-[napDNAbp]-[second adenosine deaminase]-[first adenosine deaminase]-[NLS]-COOH.

[0374] Exemplary ABEs include, without limitation, the following base editors. For the purposes of clarity, the adenosine deaminase domain may be shown in Bold; mutations of the ecTadA deaminase domain are shown in Bold underlining; the XTEN linker is shown in italics; the UGI/AAG/EndoV domains are shown in Bold italics; and NLS is shown in underlined italics:

ecTadA(wt)-XTEN-nCas9-NLS:
(SEQ ID NO: 373)
MSEVEFSHEYWMRHALTLAKRAWDEREVPVGAVLVHNNRVIGEGWNRPIGRHDPTAHAEIMAL
RQGGLVMQNYRLIDATLYVTLEPCVMCAGAMIHSRIGRVVFGARDAKTGAAGSLMDVLHHPGM
NHRVEITEGILADECAALLSDFFRMRRQEIKAQKKAQSSTDSGSETPGTSESATPESDKKYSI
GLAIGTNSVGWAVITDEYKVPSKKFKVLGNTDRHSIKKNLIGALLFDSGETAEATRLKRTARR
RYTRRKNRICYLQEIFSNEMAKVDDSFFHRLEESFLVEEDKKHERHPIFGNIVDEVAYHEKYP
TIYHLRKKLVDSTDKADLRLIYLALAHMIKFRGHFLIEGDLNPDNSDVDKLFIQLVQTYNQLF
EENPINASGVDAKAILSARLSKSRRLENLIAQLPGEKKNGLFGNLIALSLGLTPNFKSNFDLA
EDAKLQLSKDTYDDDLDNLLAQIGDQYADLFLAAKNLSDAILLSDILRVNTEITKAPLSASMI
KRYDEHHQDLTLLKALVRQQLPEKYKEIFFDQSKNGYAGYIDGGASQEEFYKFIKPILEKMDG
TEELLVKLNREDLLRKQRTFDNGSIPHQIHLGELHAILRRQEDFYPFLKDNREKIEKILTFRI
PYYVGPLARGNSRFAWMTRKSEETITPWNFEEVVDKGASAQSFIERMTNFDKNLPNEKVLPKH
SLLYEYFTVYNELTKVKYVTEGMRKPAFLSGEQKKAIVDLLFKTNRKVTVKQLKEDYFKKIEC
FDSVEISGVEDRFNASLGTYHDLLKIIKDKDFLDNEENEDILEDIVLTLTLFEDREMIEERLK
TYAHLFDDKVMKQLKRRRYTGWGRLSRKLINGIRDKQSGKTILDFLKSDGFANRNFMQLIHDD
SLTFKEDIQKAQVSGQGDSLHEHIANLAGSPAIKKGILQTVKVVDELVKVMGRHKPENIVIEM
ARENQTTQKGQKNSRERMKRIEEGIKELGSQILKEHPVENTQLQNEKLYLYYLQNGRDMYVDQ
ELDINRLSDYDVDHIVPQSFLKDDSIDNKVLTRSDKNRGKSDNVPSEEVVKKMKNYWRQLLNA
KLITQRKFDNLTKAERGGLSELDKAGFIKRQLVETRQITKHVAQILDSRMNTKYDENDKLIRE
VKVITLKSKLVSDFRKDFQFYKVREINNYHHAHDAYLNAVVGTALIKKYPKLESEFVYGDYKV
YDVRKMIAKSEQEIGKATAKYFFYSNIMNFFKTEITLANGEIRKRPLIETNGETGEIVWDKGR
DFATVRKVLSMPQVNIVKKTEVQTGGFSKESILPKRNSDKLIARKKDWDPKKYGGFDSPTVAY
SVLVVAKVEKGKSKKLKSVKELLGITIMERSSFEKNPIDFLEAKGYKEVKKDLIIKLPKYSLF
ELENGRKRMLASAGELQKGNELALPSKYVNFLYLASHYEKLKGSPEDNEQKQLFVEQHKHYLD
EIIEQISEFSKRVILADANLDKVLSAYNKHRDKPIREQAENIIHLFTLTNLGAPAAFKYFDTT
IDRKRYTSTKEVLDATLIHQSITGLYETRIDLSQLGGDSGGSPKKKRKV
ecTadA(D108N)-XTEN-nCas9-NLS: (mammalian construct,
active on DNA, A to G editing):
(SEQ ID NO: 374)
MSEVEFSHEYWMRHALTLAKRAWDEREVPVGAVLVHNNRVIGEGWNRPIGRHDPTAHAEIMAL
RQGGLVMQNYRLIDATLYVTLEPCVMCAGAMIHSRIGRVVFGARNAKTGAAGSLMDVLHHPGM
NHRVEITEGILADECAALLSDFFRMRRQEIKAQKKAQSSTDSGSETPGTSESATPESDKKYSI
GLAIGTNSVGWAVITDEYKVPSKKFKVLGNTDRHSIKKNLIGALLFDSGETAEATRLKRTARR
RYTRRKNRICYLQEIFSNEMAKVDDSFFHRLEESFLVEEDKKHERHPIFGNIVDEVAYHEKYP
TIYHLRKKLVDSTDKADLRLIYLALAHMIKFRGHFLIEGDLNPDNSDVDKLFIQLVQTYNQLF
EENPINASGVDAKAILSARLSKSRRLENLIAQLPGEKKNGLFGNLIALSLGLTPNFKSNFDLA
EDAKLQLSKDTYDDDLDNLLAQIGDQYADLFLAAKNLSDAILLSDILRVNTEITKAPLSASMI
KRYDEHHQDLTLLKALVRQQLPEKYKEIFFDQSKNGYAGYIDGGASQEEFYKFIKPILEKMDG
TEELLVKLNREDLLRKQRTFDNGSIPHQIHLGELHAILRRQEDFYPFLKDNREKIEKILTFRI
PYYVGPLARGNSRFAWMTRKSEETITPWNFEEVVDKGASAQSFIERMTNFDKNLPNEKVLPKH
SLLYEYFTVYNELTKVKYVTEGMRKPAFLSGEQKKAIVDLLFKTNRKVTVKQLKEDYFKKIEC
FDSVEISGVEDRFNASLGTYHDLLKIIKDKDFLDNEENEDILEDIVLTLTLFEDREMIEERLK
TYAHLFDDKVMKQLKRRRYTGWGRLSRKLINGIRDKQSGKTILDFLKSDGFANRNFMQLIHDD
SLTFKEDIQKAQVSGQGDSLHEHIANLAGSPAIKKGILQTVKVVDELVKVMGRHKPENIVIEM
ARENQTTQKGQKNSRERMKRIEEGIKELGSQILKEHPVENTQLQNEKLYLYYLQNGRDMYVDQ
ELDINRLSDYDVDHIVPQSFLKDDSIDNKVLTRSDKNRGKSDNVPSEEVVKKMKNYWRQLLNA
KLITQRKFDNLTKAERGGLSELDKAGFIKRQLVETRQITKHVAQILDSRMNTKYDENDKLIRE
VKVITLKSKLVSDFRKDFQFYKVREINNYHHAHDAYLNAVVGTALIKKYPKLESEFVYGDYKV
YDVRKMIAKSEQEIGKATAKYFFYSNIMNFFKTEITLANGEIRKRPLIETNGETGEIVWDKGR
DFATVRKVLSMPQVNIVKKTEVQTGGFSKESILPKRNSDKLIARKKDWDPKKYGGFDSPTVAY
SVLVVAKVEKGKSKKLKSVKELLGITIMERSSFEKNPIDFLEAKGYKEVKKDLIIKLPKYSLF
ELENGRKRMLASAGELQKGNELALPSKYVNFLYLASHYEKLKGSPEDNEQKQLFVEQHKHYLD
EIIEQISEFSKRVILADANLDKVLSAYNKHRDKPIREQAENIIHLFTLTNLGAPAAFKYFDTT
IDRKRYTSTKEVLDATLIHQSITGLYETRIDLSQLGGDSGGSPKKKRKV
ecTadA(D108G)-XTEN-nCas9-NLS: (mammalian construct,
active on DNA, A to G editing):
(SEQ ID NO: 375)
MSEVEFSHEYWMRHALTLAKRAWDEREVPVGAVLVHNNRVIGEGWNRPIGRHDPTAHAEIMAL
RQGGLVMQNYRLIDATLYVTLEPCVMCAGAMIHSRIGRVVFGARGAKTGAAGSLMDVLHHPGM
NHRVEITEGILADECAALLSDFFRMRRQEIKAQKKAQSSTDSGSETPGTSESATPESDKKYSI
GLAIGTNSVGWAVITDEYKVPSKKFKVLGNTDRHSIKKNLIGALLFDSGETAEATRLKRTARR
RYTRRKNRICYLQEIFSNEMAKVDDSFFHRLEESFLVEEDKKHERHPIFGNIVDEVAYHEKYP
TIYHLRKKLVDSTDKADLRLIYLALAHMIKFRGHFLIEGDLNPDNSDVDKLFIQLVQTYNQLF
EENPINASGVDAKAILSARLSKSRRLENLIAQLPGEKKNGLFGNLIALSLGLTPNFKSNFDLA
EDAKLQLSKDTYDDDLDNLLAQIGDQYADLFLAAKNLSDAILLSDILRVNTEITKAPLSASMI
KRYDEHHQDLTLLKALVRQQLPEKYKEIFFDQSKNGYAGYIDGGASQEEFYKFIKPILEKMDG
TEELLVKLNREDLLRKQRTFDNGSIPHQIHLGELHAILRRQEDFYPFLKDNREKIEKILTFRI
PYYVGPLARGNSRFAWMTRKSEETITPWNFEEVVDKGASAQSFIERMTNFDKNLPNEKVLPKH
SLLYEYFTVYNELTKVKYVTEGMRKPAFLSGEQKKAIVDLLFKTNRKVTVKQLKEDYFKKIEC
FDSVEISGVEDRFNASLGTYHDLLKIIKDKDFLDNEENEDILEDIVLTLTLFEDREMIEERLK
TYAHLFDDKVMKQLKRRRYTGWGRLSRKLINGIRDKQSGKTILDFLKSDGFANRNFMQLIHDD
SLTFKEDIQKAQVSGQGDSLHEHIANLAGSPAIKKGILQTVKVVDELVKVMGRHKPENIVIEM
ARENQTTQKGQKNSRERMKRIEEGIKELGSQILKEHPVENTQLQNEKLYLYYLQNGRDMYVDQ
ELDINRLSDYDVDHIVPQSFLKDDSIDNKVLTRSDKNRGKSDNVPSEEVVKKMKNYWRQLLNA
KLITQRKFDNLTKAERGGLSELDKAGFIKRQLVETRQITKHVAQILDSRMNTKYDENDKLIRE
VKVITLKSKLVSDFRKDFQFYKVREINNYHHAHDAYLNAVVGTALIKKYPKLESEFVYGDYKV
YDVRKMIAKSEQEIGKATAKYFFYSNIMNFFKTEITLANGEIRKRPLIETNGETGEIVWDKGR
DFATVRKVLSMPQVNIVKKTEVQTGGFSKESILPKRNSDKLIARKKDWDPKKYGGFDSPTVAY
SVLVVAKVEKGKSKKLKSVKELLGITIMERSSFEKNPIDFLEAKGYKEVKKDLIIKLPKYSLF
ELENGRKRMLASAGELQKGNELALPSKYVNFLYLASHYEKLKGSPEDNEQKQLFVEQHKHYLD
EIIEQISEFSKRVILADANLDKVLSAYNKHRDKPIREQAENIIHLFTLTNLGAPAAFKYFDTT
IDRKRYTSTKEVLDATLIHQSITGLYETRIDLSQLGGDSGGSPKKKRKV
ecTadA(D108V)-XTEN-nCas9-NLS: (mammalian construct,
active on DNA, A to G editing):
(SEQ ID NO: 376)
MSEVEFSHEYWMRHALTLAKRAWDEREVPVGAVLVHNNRVIGEGWNRPIGRHDPTAHAEIMAL
RQGGLVMQNYRLIDATLYVTLEPCVMCAGAMIHSRIGRVVFGARVAKTGAAGSLMDVLHHPGM
NHRVEITEGILADECAALLSDFFRMRRQEIKAQKKAQSSTDSGSETPGTSESATPESDKKYSI
GLAIGTNSVGWAVITDEYKVPSKKFKVLGNTDRHSIKKNLIGALLFDSGETAEATRLKRTARR
RYTRRKNRICYLQEIFSNEMAKVDDSFFHRLEESFLVEEDKKHERHPIFGNIVDEVAYHEKYP
TIYHLRKKLVDSTDKADLRLIYLALAHMIKFRGHFLIEGDLNPDNSDVDKLFIQLVQTYNQLF
EENPINASGVDAKAILSARLSKSRRLENLIAQLPGEKKNGLFGNLIALSLGLTPNFKSNFDLA
EDAKLQLSKDTYDDDLDNLLAQIGDQYADLFLAAKNLSDAILLSDILRVNTEITKAPLSASMI
KRYDEHHQDLTLLKALVRQQLPEKYKEIFFDQSKNGYAGYIDGGASQEEFYKFIKPILEKMDG
TEELLVKLNREDLLRKQRTFDNGSIPHQIHLGELHAILRRQEDFYPFLKDNREKIEKILTFRI
PYYVGPLARGNSRFAWMTRKSEETITPWNFEEVVDKGASAQSFIERMTNFDKNLPNEKVLPKH
SLLYEYFTVYNELTKVKYVTEGMRKPAFLSGEQKKAIVDLLFKTNRKVTVKQLKEDYFKKIEC
FDSVEISGVEDRFNASLGTYHDLLKIIKDKDFLDNEENEDILEDIVLTLTLFEDREMIEERLK
TYAHLFDDKVMKQLKRRRYTGWGRLSRKLINGIRDKQSGKTILDFLKSDGFANRNFMQLIHDD
SLTFKEDIQKAQVSGQGDSLHEHIANLAGSPAIKKGILQTVKVVDELVKVMGRHKPENIVIEM
ARENQTTQKGQKNSRERMKRIEEGIKELGSQILKEHPVENTQLQNEKLYLYYLQNGRDMYVDQ
ELDINRLSDYDVDHIVPQSFLKDDSIDNKVLTRSDKNRGKSDNVPSEEVVKKMKNYWRQLLNA
KLITQRKFDNLTKAERGGLSELDKAGFIKRQLVETRQITKHVAQILDSRMNTKYDENDKLIRE
VKVITLKSKLVSDFRKDFQFYKVREINNYHHAHDAYLNAVVGTALIKKYPKLESEFVYGDYKV
YDVRKMIAKSEQEIGKATAKYFFYSNIMNFFKTEITLANGEIRKRPLIETNGETGEIVWDKGR
DFATVRKVLSMPQVNIVKKTEVQTGGFSKESILPKRNSDKLIARKKDWDPKKYGGFDSPTVAY
SVLVVAKVEKGKSKKLKSVKELLGITIMERSSFEKNPIDFLEAKGYKEVKKDLIIKLPKYSLF
ELENGRKRMLASAGELQKGNELALPSKYVNFLYLASHYEKLKGSPEDNEQKQLFVEQHKHYLD
EIIEQISEFSKRVILADANLDKVLSAYNKHRDKPIREQAENIIHLFTLTNLGAPAAFKYFDTT
IDRKRYTSTKEVLDATLIHQSITGLYETRIDLSQLGGDSGGSPKKKRKV
ABE7.10: ecTadA_{(wild-type)}-(SGGS)₂-XTEN-(SGGS)₂-
ecTadA_{(W23R}_H36L_P48A_R51L_L84F_A106V_D108N_H123Y_
_{S146C}_D147Y_R152P_E155V_I156F_K157N)-(SGGS)2-XTEN-
(SGGS)₂_nCas9_SGGS_NLS
(SEQ ID NO: 377)
MSEVEFSHEYWMRHALTLAKRAWDEREVPVGAVLVHNNRVIGEGWNRPIGRHDPTAHAEIMAL
RQGGLVMQNYRLIDATLYVTLEPCVMCAGAMIHSRIGRVVFGARDAKTGAAGSLMDVLHHPGM
NHRVEITEGILADECAALLSDFFRMRRQEIKAQKKAQSSTDSGGSSGGSSGSETPGTSESATP
ESSGGSSGGSSEVEFSHEYWMRHALTLAKRARDEREVPVGAVLVLNNRVIGEGWNRAIGLHDP
TAHAEIMALRQGGLVMQNYRLIDATLYVTFEPCVMCAGAMIHSRIGRVVFGVRNAKTGAAGSL
MDVLHYPGMNHRVEITEGILADECAALLCYFFRMPRQVFNAQKKAQSSTDSGGSSGGSSGSET
PGTSESATPESSGGSSGGSDKKYSIGLAIGTNSVGWAVITDEYKVPSKKFKVLGNTDRHSIKK
NLIGALLFDSGETAEATRLKRTARRRYTRRKNRICYLQEIFSNEMAKVDDSFFHRLEESFLVE
EDKKHERHPIFGNIVDEVAYHEKYPTIYHLRKKLVDSTDKADLRLIYLALAHMIKFRGHFLIE
GDLNPDNSDVDKLFIQLVQTYNQLFEENPINASGVDAKAILSARLSKSRRLENLIAQLPGEKK
NGLFGNLIALSLGLTPNFKSNFDLAEDAKLQLSKDTYDDDLDNLLAQIGDQYADLFLAAKNLS
DAILLSDILRVNTEITKAPLSASMIKRYDEHHQDLTLLKALVRQQLPEKYKEIFFDQSKNGYA
GYIDGGASQEEFYKFIKPILEKMDGTEELLVKLNREDLLRKQRTFDNGSIPHQIHLGELHAIL
RRQEDFYPFLKDNREKIEKILTFRIPYYVGPLARGNSRFAWMTRKSEETITPWNFEEVVDKGA
SAQSFIERMTNFDKNLPNEKVLPKHSLLYEYFTVYNELTKVKYVTEGMRKPAFLSGEQKKAIV
DLLFKTNRKVTVKQLKEDYFKKIECFDSVEISGVEDRFNASLGTYHDLLKIIKDKDFLDNEEN
EDILEDIVLTLTLFEDREMIEERLKTYAHLFDDKVMKQLKRRRYTGWGRLSRKLINGIRDKQS
GKTILDFLKSDGFANRNFMQLIHDDSLTFKEDIQKAQVSGQGDSLHEHIANLAGSPAIKKGIL
QTVKVVDELVKVMGRHKPENIVIEMARENQTTQKGQKNSRERMKRIEEGIKELGSQILKEHPV
ENTQLQNEKLYLYYLQNGRDMYVDQELDINRLSDYDVDHIVPQSFLKDDSIDNKVLTRSDKNR
GKSDNVPSEEVVKKMKNYWRQLLNAKLITQRKFDNLTKAERGGLSELDKAGFIKRQLVETRQI
TKHVAQILDSRMNTKYDENDKLIREVKVITLKSKLVSDFRKDFQFYKVREINNYHHAHDAYLN
AVVGTALIKKYPKLESEFVYGDYKVYDVRKMIAKSEQEIGKATAKYFFYSNIMNFFKTEITLA
NGEIRKRPLIETNGETGEIVWDKGRDFATVRKVLSMPQVNIVKKTEVQTGGFSKESILPKRNS
DKLIARKKDWDPKKYGGFDSPTVAYSVLVVAKVEKGKSKKLKSVKELLGITIMERSSFEKNPI
DFLEAKGYKEVKKDLIIKLPKYSLFELENGRKRMLASAGELQKGNELALPSKYVNFLYLASHY
EKLKGSPEDNEQKQLFVEQHKHYLDEIIEQISEFSKRVILADANLDKVLSAYNKHRDKPIREQ
AENIIHLFTLTNLGAPAAFKYFDTTIDRKRYTSTKEVLDATLIHQSITGLYETRIDLSQLGGD
SGGSPKKKRKV
ABEmax (7.10): NLS_ecTadA_{(wild-type)}-(SGGS)₂-XTEN-
(SGGS)₂-ecTadA7.10_{(W23R}_H36L_P48A_R51L_L84F_A106V_
_{D108N}_H123Y_S146C_D147Y_R152P_E155V_I156F_K157N)-
(SGGS)₂-XTEN-(SGGS)₂_nCas9 VRQR_SGGS_NLS
(SEQ ID NO: 378)
MKRTADGSEFESPKKKRKVSEVEFSHEYWMRHALTLAKRAWDEREVPVGAVLVHNNRVIGEGW
NRPIGRHDPTAHAEIMALRQGGLVMQNYRLIDATLYVTLEPCVMCAGAMIHSRIGRVVFGARD
AKTGAAGSLMDVLHHPGMNHRVEITEGILADECAALLSDFFRMRRQEIKAQKKAQSSTDSGGS
SGGSSGSETPGTSESATPESSGGSSGGSSEVEFSHEYWMRHALTLAKRARDEREVPVGAVLVL
NNRVIGEGWNRAIGLHDPTAHAEIMALRQGGLVMQNYRLIDATLYVTFEPCVMCAGAMIHSRI
GRVVFGVRNAKTGAAGSLMDVLHYPGMNHRVEITEGILADECAALLCYFFRMPRQVFNAQKKA
QSSTDSGGSSGGSSGSETPGTSESATPESSGGSSGGSDKKYSIGLAIGTNSVGWAVITDEYKV
PSKKFKVLGNTDRHSIKKNLIGALLFDSGETAEATRLKRTARRRYTRRKNRICYLQEIFSNEM
AKVDDSFFHRLEESFLVEEDKKHERHPIFGNIVDEVAYHEKYPTIYHLRKKLVDSTDKADLRL
IYLALAHMIKFRGHFLIEGDLNPDNSDVDKLFIQLVQTYNQLFEENPINASGVDAKAILSARL
SKSRRLENLIAQLPGEKKNGLFGNLIALSLGLTPNFKSNFDLAEDAKLQLSKDTYDDDLDNLL
AQIGDQYADLFLAAKNLSDAILLSDILRVNTEITKAPLSASMIKRYDEHHQDLTLLKALVRQQ
LPEKYKEIFFDQSKNGYAGYIDGGASQEEFYKFIKPILEKMDGTEELLVKLNREDLLRKQRTF
DNGSIPHQIHLGELHAILRRQEDFYPFLKDNREKIEKILTFRIPYYVGPLARGNSRFAWMTRK
SEETITPWNFEEVVDKGASAQSFIERMTNFDKNLPNEKVLPKHSLLYEYFTVYNELTKVKYVT
EGMRKPAFLSGEQKKAIVDLLFKTNRKVTVKQLKEDYFKKIECFDSVEISGVEDRFNASLGTY
HDLLKIIKDKDFLDNEENEDILEDIVLTLTLFEDREMIEERLKTYAHLFDDKVMKQLKRRRYT
GWGRLSRKLINGIRDKQSGKTILDFLKSDGFANRNFMQLIHDDSLTFKEDIQKAQVSGQGDSL
HEHIANLAGSPAIKKGILQTVKVVDELVKVMGRHKPENIVIEMARENQTTQKGQKNSRERMKR
IEEGIKELGSQILKEHPVENTQLQNEKLYLYYLQNGRDMYVDQELDINRLSDYDVDHIVPQSF
LKDDSIDNKVLTRSDKNRGKSDNVPSEEVVKKMKNYWRQLLNAKLITQRKFDNLTKAERGGLS
ELDKAGFIKRQLVETRQITKHVAQILDSRMNTKYDENDKLIREVKVITLKSKLVSDFRKDFQF
YKVREINNYHHAHDAYLNAVVGTALIKKYPKLESEFVYGDYKVYDVRKMIAKSEQEIGKATAK
YFFYSNIMNFFKTEITLANGEIRKRPLIETNGETGEIVWDKGRDFATVRKVLSMPQVNIVKKT
EVQTGGFSKESILPKRNSDKLIARKKDWDPKKYGGFVSPTVAYSVLVVAKVEKGKSKKLKSVK
ELLGITIMERSSFEKNPIDFLEAKGYKEVKKDLIIKLPKYSLFELENGRKRMLASARELQKGN
ELALPSKYVNFLYLASHYEKLKGSPEDNEQKQLFVEQHKHYLDEIIEQISEFSKRVILADANL
DKVLSAYNKHRDKPIREQAENIIHLFTLTNLGAPAAFKYFDTTIDRKQYRSTKEVLDATLIHQ
SITGLYETRIDLSQLGGDSGGSKRTADGSEFEPKKKRKV
ABE8e (monomer)
(SEQ ID NO: 379)
MKRTADGSEFESPKKKRKVSEVEFSHEYWMRHALTLAKRARDEREVPVGAVLVLNNRVIGEGW
NRAIGLHDPTAHAEIMALRQGGLVMQNYRLIDATLYVTFEPCVMCAGAMIHSRIGRVVFGVRN
SKRGAAGSLMNVLNYPGMNHRVEITEGILADECAALLCDFYRMPRQVFNAQKKAQSSINSGGS
SGGSSGSETPGTSESATPESSGGSSGGSDKKYSIGLAIGTNSVGWAVITDEYKVPSKKFKVLG
NTDRHSIKKNLIGALLFDSGETAEATRLKRTARRRYTRRKNRICYLQEIFSNEMAKVDDSFFH
RLEESFLVEEDKKHERHPIFGNIVDEVAYHEKYPTIYHLRKKLVDSTDKADLRLIYLALAHMI
KFRGHFLIEGDLNPDNSDVDKLFIQLVQTYNQLFEENPINASGVDAKAILSARLSKSRRLENL
IAQLPGEKKNGLFGNLIALSLGLTPNFKSNFDLAEDAKLQLSKDTYDDDLDNLLAQIGDQYAD
LFLAAKNLSDAILLSDILRVNTEITKAPLSASMIKRYDEHHQDLTLLKALVRQQLPEKYKEIF
FDQSKNGYAGYIDGGASQEEFYKFIKPILEKMDGTEELLVKLNREDLLRKQRTFDNGSIPHQI
HLGELHAILRRQEDFYPFLKDNREKIEKILTFRIPYYVGPLARGNSRFAWMTRKSEETITPWN
FEEVVDKGASAQSFIERMTNFDKNLPNEKVLPKHSLLYEYFTVYNELTKVKYVTEGMRKPAFL
SGEQKKAIVDLLFKTNRKVTVKQLKEDYFKKIECFDSVEISGVEDRFNASLGTYHDLLKIIKD
KDFLDNEENEDILEDIVLTLTLFEDREMIEERLKTYAHLFDDKVMKQLKRRRYTGWGRLSRKL
INGIRDKQSGKTILDFLKSDGFANRNFMQLIHDDSLTFKEDIQKAQVSGQGDSLHEHIANLAG
SPAIKKGILQTVKVVDELVKVMGRHKPENIVIEMARENQTTQKGQKNSRERMKRIEEGIKELG
SQILKEHPVENTQLQNEKLYLYYLQNGRDMYVDQELDINRLSDYDVDHIVPQSFLKDDSIDNK
VLTRSDKNRGKSDNVPSEEVVKKMKNYWRQLLNAKLITQRKFDNLTKAERGGLSELDKAGFIK
RQLVETRQITKHVAQILDSRMNTKYDENDKLIREVKVITLKSKLVSDFRKDFQFYKVREINNY
HHAHDAYLNAVVGTALIKKYPKLESEFVYGDYKVYDVRKMIAKSEQEIGKATAKYFFYSNIMN
FFKTEITLANGEIRKRPLIETNGETGEIVWDKGRDFATVRKVLSMPQVNIVKKTEVQTGGFSK
ESILPKRNSDKLIARKKDWDPKKYGGFDSPTVAYSVLVVAKVEKGKSKKLKSVKELLGITIME
RSSFEKNPIDFLEAKGYKEVKKDLIIKLPKYSLFELENGRKRMLASAGELQKGNELALPSKYV
NFLYLASHYEKLKGSPEDNEQKQLFVEQHKHYLDEIIEQISEFSKRVILADANLDKVLSAYNK
HRDKPIREQAENIIHLFTLTNLGAPAAFKYFDTTIDRKRYTSTKEVLDATLIHQSITGLYETR
IDLSQLGGDSGGSKRTADGSEFEPKKKRKV
ABE8e (dimer)
(SEQ ID NO: 380)
MKRTADGSEFESPKKKRKVSEVEFSHEYWMRHALTLAKRAWDEREVPVGAVLVHNNRVIGEGW
NRPIGRHDPTAHAEIMALRQGGLVMQNYRLIDATLYVTLEPCVMCAGAMIHSRIGRVVFGARD
AKTGAAGSLMDVLHHPGMNHRVEITEGILADECAALLSDFFRMRRQEIKAQKKAQSSTDSGGS
SGGSSGSETPGTSESATPESSGGSSGGSSEVEFSHEYWMRHALTLAKRARDEREVPVGAVLVL
NNRVIGEGWNRAIGLHDPTAHAEIMALRQGGLVMQNYRLIDATLYVTFEPCVMCAGAMIHSRI
GRVVFGVRNSKRGAAGSLMNVLNYPGMNHRVEITEGILADECAALLCDFYRMPRQVFNAQKKA
QSSINSGGSSGGSSGSETPGTSESATPESSGGSSGGSDKKYSIGLAIGTNSVGWAVITDEYKV
PSKKFKVLGNTDRHSIKKNLIGALLFDSGETAEATRLKRTARRRYTRRKNRICYLQEIFSNEM
AKVDDSFFHRLEESFLVEEDKKHERHPIFGNIVDEVAYHEKYPTIYHLRKKLVDSTDKADLRL
IYLALAHMIKFRGHFLIEGDLNPDNSDVDKLFIQLVQTYNQLFEENPINASGVDAKAILSARL
SKSRRLENLIAQLPGEKKNGLFGNLIALSLGLTPNFKSNFDLAEDAKLQLSKDTYDDDLDNLL
AQIGDQYADLFLAAKNLSDAILLSDILRVNTEITKAPLSASMIKRYDEHHQDLTLLKALVRQQ
LPEKYKEIFFDQSKNGYAGYIDGGASQEEFYKFIKPILEKMDGTEELLVKLNREDLLRKQRTF
DNGSIPHQIHLGELHAILRRQEDFYPFLKDNREKIEKILTFRIPYYVGPLARGNSRFAWMTRK
SEETITPWNFEEVVDKGASAQSFIERMTNFDKNLPNEKVLPKHSLLYEYFTVYNELTKVKYVT
EGMRKPAFLSGEQKKAIVDLLFKTNRKVTVKQLKEDYFKKIECFDSVEISGVEDRFNASLGTY
HDLLKIIKDKDFLDNEENEDILEDIVLTLTLFEDREMIEERLKTYAHLFDDKVMKQLKRRRYT
GWGRLSRKLINGIRDKQSGKTILDFLKSDGFANRNFMQLIHDDSLTFKEDIQKAQVSGQGDSL
HEHIANLAGSPAIKKGILQTVKVVDELVKVMGRHKPENIVIEMARENQTTQKGQKNSRERMKR
IEEGIKELGSQILKEHPVENTQLQNEKLYLYYLQNGRDMYVDQELDINRLSDYDVDHIVPQSF
LKDDSIDNKVLTRSDKNRGKSDNVPSEEVVKKMKNYWRQLLNAKLITQRKFDNLTKAERGGLS
ELDKAGFIKRQLVETRQITKHVAQILDSRMNTKYDENDKLIREVKVITLKSKLVSDFRKDFQF
YKVREINNYHHAHDAYLNAVVGTALIKKYPKLESEFVYGDYKVYDVRKMIAKSEQEIGKATAK
YFFYSNIMNFFKTEITLANGEIRKRPLIETNGETGEIVWDKGRDFATVRKVLSMPQVNIVKKT
EVQTGGFSKESILPKRNSDKLIARKKDWDPKKYGGFDSPTVAYSVLVVAKVEKGKSKKLKSVK
ELLGITIMERSSFEKNPIDFLEAKGYKEVKKDLIIKLPKYSLFELENGRKRMLASAGELQKGN
ELALPSKYVNFLYLASHYEKLKGSPEDNEQKQLFVEQHKHYLDEIIEQISEFSKRVILADANL
DKVLSAYNKHRDKPIREQAENIIHLFTLTNLGAPAAFKYFDTTIDRKRYTSTKEVLDATLIHQ
SITGLYETRIDLSQLGGDSGGSKRTADGSEFEPKKKRKV
SaABE8e
(SEQ ID NO: 381)
MKRTADGSEFESPKKKRKVSEVEFSHEYWMRHALTLAKRARDEREVPVGAVLVLNNRVIGEGW
NRAIGLHDPTAHAEIMALRQGGLVMQNYRLIDATLYVTFEPCVMCAGAMIHSRIGRVVFGVRN
SKRGAAGSLMNVLNYPGMNHRVEITEGILADECAALLCDFYRMPRQVFNAQKKAQSSINSGGS
SGGSSGSETPGTSESATPESSGGSSGGSGKRNYILGLAIGITSVGYGIIDYETRDVIDAGVRL
FKEANVENNEGRRSKRGARRLKRRRRHRIQRVKKLLFDYNLLTDHSELSGINPYEARVKGLSQ
KLSEEEFSAALLHLAKRRGVHNVNEVEEDTGNELSTKEQISRNSKALEEKYVAELQLERLKKD
GEVRGSINRFKTSDYVKEAKQLLKVQKAYHQLDQSFIDTYIDLLETRRTYYEGPGEGSPFGWK
DIKEWYEMLMGHCTYFPEELRSVKYAYNADLYNALNDLNNLVITRDENEKLEYYEKFQIIENV
FKQKKKPTLKQIAKEILVNEEDIKGYRVTSTGKPEFTNLKVYHDIKDITARKEIIENAELLDQ
IAKILTIYQSSEDIQEELTNLNSELTQEEIEQISNLKGYTGTHNLSLKAINLILDELWHTNDN
QIAIFNRLKLVPKKVDLSQQKEIPTTLVDDFILSPVVKRSFIQSIKVINAIIKKYGLPNDIII
ELAREKNSKDAQKMINEMQKRNRQTNERIEEIIRTTGKENAKYLIEKIKLHDMQEGKCLYSLE
AIPLEDLLNNPFNYEVDHIIPRSVSFDNSFNNKVLVKQEENSKKGNRTPFQYLSSSDSKISYE
TFKKHILNLAKGKGRISKTKKEYLLEERDINRFSVQKDFINRNLVDTRYATRGLMNLLRSYFR
VNNLDVKVKSINGGFTSFLRRKWKFKKERNKGYKHHAEDALIIANADFIFKEWKKLDKAKKVM
ENQMFEEKQAESMPEIETEQEYKEIFITPHQIKHIKDFKDYKYSHRVDKKPNRELINDTLYST
RKDDKGNTLIVNNLNGLYDKDNDKLKKLINKSPEKLLMYHHDPQTYQKLKLIMEQYGDEKNPL
YKYYEETGNYLTKYSKKDNGPVIKKIKYYGNKLNAHLDITDDYPNSRNKVVKLSLKPYRFDVY
LDNGVYKFVTVKNLDVIKKENYYEVNSKCYEEAKKLKKISNQAEFIASFYNNDLIKINGELYR
VIGVNNDLLNRIEVNMIDITYREYLENMNDKRPPRIIKTIASKTQSIKKYSTDILGNLYEVKS
KKHPQIIKKGSGGSKRTADGSEFEPKKKRKV
SpCas9NG-ABE8e (“ABE8e-NG”)
(SEQ ID NO: 382)
MKRTADGSEFESPKKKRKVSEVEFSHEYWMRHALTLAKRARDEREVPVGAVLVLNNRVIGEGW
NRAIGLHDPTAHAEIMALRQGGLVMQNYRLIDATLYVTFEPCVMCAGAMIHSRIGRVVFGVRN
SKRGAAGSLMNVLNYPGMNHRVEITEGILADECAALLCDFYRMPRQVFNAQKKAQSSINSGGS
SGGSSGSETPGTSESATPESSGGSSGGSDKKYSIGLAIGTNSVGWAVITDEYKVPSKKFKVLG
NTDRHSIKKNLIGALLFDSGETAEATRLKRTARRRYTRRKNRICYLQEIFSNEMAKVDDSFFH
RLEESFLVEEDKKHERHPIFGNIVDEVAYHEKYPTIYHLRKKLVDSTDKADLRLIYLALAHMI
KFRGHFLIEGDLNPDNSDVDKLFIQLVQTYNQLFEENPINASGVDAKAILSARLSKSRRLENL
IAQLPGEKKNGLFGNLIALSLGLTPNFKSNFDLAEDAKLQLSKDTYDDDLDNLLAQIGDQYAD
LFLAAKNLSDAILLSDILRVNTEITKAPLSASMIKRYDEHHQDLTLLKALVRQQLPEKYKEIF
FDQSKNGYAGYIDGGASQEEFYKFIKPILEKMDGTEELLVKLNREDLLRKQRTFDNGSIPHQI
HLGELHAILRRQEDFYPFLKDNREKIEKILTFRIPYYVGPLARGNSRFAWMTRKSEETITPWN
FEEVVDKGASAQSFIERMTNFDKNLPNEKVLPKHSLLYEYFTVYNELTKVKYVTEGMRKPAFL
SGEQKKAIVDLLFKTNRKVTVKQLKEDYFKKIECFDSVEISGVEDRFNASLGTYHDLLKIIKD
KDFLDNEENEDILEDIVLTLTLFEDREMIEERLKTYAHLFDDKVMKQLKRRRYTGWGRLSRKL
INGIRDKQSGKTILDFLKSDGFANRNFMQLIHDDSLTFKEDIQKAQVSGQGDSLHEHIANLAG
SPAIKKGILQTVKVVDELVKVMGRHKPENIVIEMARENQTTQKGQKNSRERMKRIEEGIKELG
SQILKEHPVENTQLQNEKLYLYYLQNGRDMYVDQELDINRLSDYDVDHIVPQSFLKDDSIDNK
VLTRSDKNRGKSDNVPSEEVVKKMKNYWRQLLNAKLITQRKFDNLTKAERGGLSELDKAGFIK
RQLVETRQITKHVAQILDSRMNTKYDENDKLIREVKVITLKSKLVSDFRKDFQFYKVREINNY
HHAHDAYLNAVVGTALIKKYPKLESEFVYGDYKVYDVRKMIAKSEQEIGKATAKYFFYSNIMN
FFKTEITLANGEIRKRPLIETNGETGEIVWDKGRDFATVRKVLSMPQVNIVKKTEVQTGGFSK
ESIRPKRNSDKLIARKKDWDPKKYGGFVSPTVAYSVLVVAKVEKGKSKKLKSVKELLGITIME
RSSFEKNPIDFLEAKGYKEVKKDLIIKLPKYSLFELENGRKRMLASARFLQKGNELALPSKYV
NFLYLASHYEKLKGSPEDNEQKQLFVEQHKHYLDEIIEQISEFSKRVILADANLDKVLSAYNK
HRDKPIREQAENIIHLFTLTNLGAPRAFKYFDTTIDRKVYRSTKEVLDATLIHQSITGLYETR
IDLSQLGGDSGGSKRTADGSEFEPKKKRKV
SaKKH-ABE8e (“ABE8e-KKH”)
(SEQ ID NO: 383)
MKRTADGSEFESPKKKRKVSEVEFSHEYWMRHALTLAKRARDEREVPVGAVLVLNNRVIGEGW
NRAIGLHDPTAHAEIMALRQGGLVMQNYRLIDATLYVTFEPCVMCAGAMIHSRIGRVVFGVRN
SKRGAAGSLMNVLNYPGMNHRVEITEGILADECAALLCDFYRMPRQVFNAQKKAQSSINSGGS
SGGSSGSETPGTSESATPESSGGSSGGSGKRNYILGLAIGITSVGYGIIDYETRDVIDAGVRL
FKEANVENNEGRRSKRGARRLKRRRRHRIQRVKKLLFDYNLLTDHSELSGINPYEARVKGLSQ
KLSEEEFSAALLHLAKRRGVHNVNEVEEDTGNELSTKEQISRNSKALEEKYVAELQLERLKKD
GEVRGSINRFKTSDYVKEAKQLLKVQKAYHQLDQSFIDTYIDLLETRRTYYEGPGEGSPFGWK
DIKEWYEMLMGHCTYFPEELRSVKYAYNADLYNALNDLNNLVITRDENEKLEYYEKFQIIENV
FKQKKKPTLKQIAKEILVNEEDIKGYRVTSTGKPEFTNLKVYHDIKDITARKEIIENAELLDQ
IAKILTIYQSSEDIQEELTNLNSELTQEEIEQISNLKGYTGTHNLSLKAINLILDELWHTNDN
QIAIFNRLKLVPKKVDLSQQKEIPTTLVDDFILSPVVKRSFIQSIKVINAIIKKYGLPNDIII
ELAREKNSKDAQKMINEMQKRNRQTNERIEEIIRTTGKENAKYLIEKIKLHDMQEGKCLYSLE
AIPLEDLLNNPFNYEVDHIIPRSVSFDNSFNNKVLVKQEENSKKGNRTPFQYLSSSDSKISYE
TFKKHILNLAKGKGRISKTKKEYLLEERDINRFSVQKDFINRNLVDTRYATRGLMNLLRSYFR
VNNLDVKVKSINGGFTSFLRRKWKFKKERNKGYKHHAEDALIIANADFIFKEWKKLDKAKKVM
ENQMFEEKQAESMPEIETEQEYKEIFITPHQIKHIKDFKDYKYSHRVDKKPNRKLINDTLYST
RKDDKGNTLIVNNLNGLYDKDNDKLKKLINKSPEKLLMYHHDPQTYQKLKLIMEQYGDEKNPL
YKYYEETGNYLTKYSKKDNGPVIKKIKYYGNKLNAHLDITDDYPNSRNKVVKLSLKPYRFDVY
LDNGVYKFVTVKNLDVIKKENYYEVNSKCYEEAKKLKKISNQAEFIASFYKNDLIKINGELYR
VIGVNNDLLNRIEVNMIDITYREYLENMNDKRPPHIIKTIASKTQSIKKYSTDILGNLYEVKS
KKHPQIIKKGSGGSKRTADGSEFEPKKKRKV
ABE8-NRTTH: NLS, TadA, linker, TadA, NRTH
(SEQ ID NO: 384)
MKRTADGSEFESPKKKRKVSEVEFSHEYWMRHALTLAKRARDEREVPVGAVLVLNNRVIGEGW
NRAIGLHDPTAHAEIMALRQGGLVMQNYRLIDATLYVTFEPCVMCAGAMIHSRIGRVVFGVRN
SKRGAAGSLMNVLNYPGMNHRVEITEGILADECAALLCDFYRMPRQVFNAQKKAQSSINSGGS
SGGSSGSETPGTSESATPESSGGSSGGSSEVEFSHEYWMRHALTLAKRARDEREVPVGAVLVL
NNRVIGEGWNRAIGLHDPTAHAEIMAERQGGEVMQNYREIDATEYVTFEPCVMCAGAMIHSRI
GRWFGVRNSKRGAAGSEMNVENYPGMNHRVEITEGIEADECAAEECDFYRMPRQVFNAQKKAQ
SSINSGGSSGGSSGSETPGTSESATPESSGGSSGGSDKKYSIGETIGTNSVGWAVITDEYKVP
SKKFKVEGNTDRHSIKKNEIGAEEFDSGETAEATREKRTARRRYTRRKNRICYEQEIFSNEMA
KVDDSFFHREEESFEVEEDKKHERHPIFGNIVDEVAYHEKYPTIYHERKKEVDSTDKADEREI
YEAEAHMIKFRGHFEIEGDENPDNSDVDKEFIQEVQTYNQEFEENPINASGVDAKAIESARES
KSRREENEIAQEPGEKKNGEFGNEIAESEGETPNFKSNFDEAEDAKEQESKDTYDDDEDNEEA
QIGDQYADEFEAAKNESDAIEESDIERVNTEITKAPESASMVKRYDEHHQDETEEKAEVRQQE
PEKYKEIFFDQSKNGYAGYIDGGASQEEFYKFIKPIEEKMDGTEEEEVKENREDEERKQRTFD
NGIIPHQIHLGELHAILRRQGDFYPFLKDNREKIEKILTFRIPYYVGPLARGNSRFAWMTRKS
EETITPWNFEEVVDKGASAQSFIERMTNFDKNEPNEKVEPKHSEEYEYFTVYNEETKVKYVFE
GMRKPAFESGEQKKAIVDEEFKTNRKVTVKQEKEDYFKKIECFDSVEISGVEDRFNASEGTYH
DEEKIIKDKDFEDNEENEDIEEDIVETETEFEDREMIEEREKTYAHEFDDKVMKQEKRERYTG
WGRESRKEINGIRDKQSGKTIEDFEKSDGFANRNFMQEIHDDSETFKEDIQKAQVSCQGDSEH
EHIANEAGSPAIKKGIEQTVKWDEEVKVMGGHKPENIVIEMARENQTTQKGQKNSRERMKRIE
EGIKEEGSQIEKEHPVENTQEQNEKEYEYYEQNGRDMYVDQEEDINRESDYDVDHIVPQSFEK
DDSIDNKVETRSDKNRGKSDNVPSEEVVKKMKNYWRQEENAKEITQRKFDNETKAERGGESEE
DKAGFIKRQEVETRQITKHVAQIEDSRMNTKYDENDKEIREVKVITEKSKEVSDFRKDFQFYK
VREINNYHHAHDAYENAVVGTAEIKKYPKEESEFVYGDYKVYDVRKMIAKSEQEIGKATAKYF
FYSNIMNFFKTEITEANGEIRKRPEIETNGETGEIVWDKGRDFATVRKVESMPQVNIVKKTEV
QTGGFSKESIEPKGNSDKEIARKKDWDPKKYGGFNSPTVAYSVEVVAKVEKGKSKKEKSVKEE
EGITIMERSSFEKNPIGFEEAKGYKEVKKDEIIKEPKYSEFEEENGRKRMEASASVEHKGNEE
AEPSKYVNFEYEASHYEKEKGSSEDNKQKQEFVEQHKHYEDEIIEQISEFSKRVIEADANEDK
VESAYNKHRDKPIREQAENIIHEFTETNEGASAAFKYFDTTIGRKLYTSTKEVLDATLIHQSI
TGLYETRIDLSQLGGDSGGSKRTADGSEFEPKKKRKV
ABE8-NRRH: NLS, TadA, linker, TadA, NRRH
(SEQ ID NO: 385)
MKRTADGSEFESPKKKRKVSEVEFSHEYWMRHALTLAKRARDEREVPVGAVLVLNNRVIGEGW
NRAIGLHDPTAHAEIMALRQGGLVMQNYRLIDATLYVTFEPCVMCAGAMIHSRIGRVVFGVRN
SKRGAAGSLMNVLNYPGMNHRVEITEGILADECAALLCDFYRMPRQVFNAQKKAQSSINSGGS
SGGSSGSETPGTSESATPESSGGSSGGSSEVEFSHEYWMRHAETEAKRARDEREVPVGAVEVE
NNRVIGEGWNRAIGEHDPTAHAEIMAERQGGEVMQNYREIDATEYVTFEPCVMCAGAMIHSRI
GRVVFGVRNSKRGAAGSEMNVENYPGMNHRVEITEGIEADECAAEECDFYRMPRQVFNAQKKA
QSSINSGGSSGGSSGSETPGESESAEPESSGGSSGGSDKKYSIGLTIGTNSVGWAVITDEYKV
PSKKFKVLGNTDRHSIKKNLIGALLFDSGETAEATRLKRTARRRYTRRKNRICYLQEIFSNEM
AKVDDSFFHRLEESFLVEEDKKHERHPIFGNIVDEVAYHEKYPTIYHLRKKLVDSTDKADLRL
IYLALAHMIKFRGHFLIEGDLNPDNSDVDKLFIQLVQTYNQLFEENPINASGVDAKAILSARL
SKSRRLENLIAQLPGEKKNGLFGNLIALSLGLTPNFKSNFDLAEDAKLQLSKDTYDDDLDNLL
AQIGDQYADLFLAAKNLSDAILLSDILRVNTEITKAPLSASMVKRYDEHHQDLTLLKALVRQQ
LPEKYKEIFFDQSKNGYAGYIDGGASQEEFYKFIKPILEKMDGTEELLVKLNREDLLRKQRTF
DNGIIPHQIHLGELHAILRRQGDFYPFLKDNREKIEKILTFRIPYYVGPLARGNSRFAWMTRK
SEETITPWNFEEVVDKGASAQSFIERMTNFDKNLPNEKVLPKHSLLYEYFTVYNELTKVKYVF
EGMRKPAFESGEQKKAIVDEEFKTNRKVTVKQEKEDYFKKIECFDSVEISGVEDRFNASEGTY
HDEEKIIKDKDFEDNEENEDIEEDIVETETEFEDREMIEEREKTYAHEFDDKVMKQEKRERYT
GWGRESRKEINGIRDKQSGKTIEDFEKSDGFANRNFMQEIHDDSETFKEDIQKAQVSCQGDSE
HEHIANEAGSPAIKKGIEQTVKWDEEVKVMGGHKPENIVIEMARENQTTQKGQKNSRERMKRI
EEGIKEEGSQIEKEHPVENTQEQNEKEYEYYEQNGRDMYVDQEEDINRESDYDVDHIVPQSFE
KDDSIDNKVETRSDKNRGKSDNVPSEEVVKKMKNYWRQEENAKEITQRKFDNETKAERGGESE
EDKAGFIKRQEVETRQITKHVAQIEDSRMNTKYDENDKEIREVKVITEKSKEVSDFRKDFQFY
KVREINNYHHAHDAYENAVVGTAEIKKYPKEESEFVYGDYKVYDVRKMIAKSEQEIGKATAKY
FFYSNIMNFFKTEITEANGEIRKRPEIETNGETGEIVWDKGRDFATVRKVESMPQVNIVKKTE
VQTGGFSKESIEPKGNSDKEIARKKDWDPKKYGGFNSPTAAYSVEVVAKVEKGKSKKEKSVKE
EEGITIMERSSFEKNPIGFEEAKGYKEVKKDEIIKEPKYSEFEEENGRKRMEASAGVEHKGNE
EAEPSKYVNFEYEASHYEKEKGSPEDNEQKQEFVEQHKHYEDEIIEQISEFSKRVIEADANED
KVESAYNKHRDKPIREQAENIIHEFTETNEGVPAAFKYFDTTIDKKRYTSTKEVLDATLIHQS
ITGLYETRIDLSQLGGDSGGSKRTADGSEFEPKKKRKV
xCas9(3.7)-ABE(7.10): ( [symbol] - [symbol] -
ecTadA*(7.10)- [symbol] -nxCas9(3.7)-NLS):
(SEQ ID NO: 386)

[symbol]

[symbol]

[symbol]

[symbol]

[symbol]

[symbol]

[symbol]

[symbol]

[symbol]

[symbol]

[symbol]

SEVEFSHEYWMRHALTLAKRARDEREVPVGA
VEVENNRVIGEGWNRAIGEHDPTAHAEIMAERQGGEVMQNYREIDATEYVTFEPCVMCAGAMI
HSRIGRWFGVRNAKTGAAGSEMDVEHYPGMNHRVEITEGIEADECAAEECYFFRMPRQVFNAQ
KKAQSSTD [symbol] [symbol] DKKYSIGLAIGTNSVGWAVITDE
YKVPSKKFKVLGNTDRHSIKKNLIGALLFDSGETAEATRLKRTARRRYTRRKNRICYLQEIFS
NEMAKVDDSFFHRLEESFLVEEDKKHERHPIFGNIVDEVAYHEKYPTIYHLRKKLVDSTDKAD
LRLIYLALAHMIKFRGHFLIEGDLNPDNSDVDKLFIQLVQTYNQLFEENPINASGVDAKAILS
ARLSKSRRLENLIAQLPGEKKNGLFGNLIALSLGLTPNFKSNFDLAEDTKLQLSKDTYDDDLD
NLLAQIGDQYADLFLAAKNLSDAILLSDILRVNTEITKAPLSASMIKLYDEHHQDLTLLKALV
RQQLPEKYKEIFFDQSKNGYAGYIDGGASQEEFYKFIKPILEKMDGTEELLVKLNREDLLRKQ
RTFDNGIIPHQIHLGELHAILRRQEDFYPFLKDNREKIEKILTFRIPYYVGPLARGNSRFAWM
TRKSEETITPWNFEKVVDKGASAQSFIERMTNFDKNLPNEKVLPKHSLLYEYFTVYNELTKVK
YVTEGMRKPAFLSGDQKKAIVDLLFKTNRKVTVKQLKEDYFKKIECFDSVEISGVEDRFNASL
GTYHDLLKIIKDKDFLDNEENEDILEDIVLTLTLFEDREMIEERLKTYAHLFDDKVMKQLKRR
RYTGWGRLSRKLINGIRDKQSGKTILDFLKSDGFANRNFIQLIHDDSLTFKEDIQKAQVSGQG
DSLHEHIANLAGSPAIKKGILQTVKVVDELVKVMGRHKPENIVIEMARENQTTQKGQKNSRER
MKRIEEGIKELGSQILKEHPVENTQLQNEKLYLYYLQNGRDMYVDQELDINRLSDYDVDHIVP
QSFLKDDSIDNKVLTRSDKNRGKSDNVPSEEVVKKMKNYWRQLLNAKLITQRKFDNLTKAERG
GLSELDKAGFIKRQLVETRQITKHVAQILDSRMNTKYDENDKLIREVKVITLKSKLVSDFRKD
FQFYKVREINNYHHAHDAYLNAVVGTALIKKYPKLESEFVYGDYKVYDVRKMIAKSEQEIGKA
TAKYFFYSNIMNFFKTEITLANGEIRKRPLIETNGETGEIVWDKGRDFATVRKVLSMPQVNIV
KKTEVQTGGFSKESILPKRNSDKLIARKKDWDPKKYGGFDSPTVAYSVLVVAKVEKGKSKKLK
SVKELLGITIMERSSFEKNPIDFLEAKGYKEVKKDLIIKLPKYSLFELENGRKRMLASAGVLQ
KGNELALPSKYVNFLYLASHYEKLKGSPEDNEQKQLFVEQHKHYLDEIIEQISEFSKRVILAD
ANLDKVLSAYNKHRDKPIREQAENIIHLFTLTNLGAPAAFKYFDTTIDRKRYTSTKEVLDATL
IHQSITGLYETRIDLSQLGGD [symbol] PKKKRKV
ABE8-VRQR: NFS, TadA, linker, TadA, SpCas9-VRQR
(SEQ ID NO: 387)
MKRTADGSEFESPKKKRKVSEVEFSHEYWMRHALTLAKRARDEREVPVGAVLVLNNRVIGEGW
NRAIGLHDPTAHAEIMALRQGGLVMQNYRLIDATLYVTFEPCVMCAGAMIHSRIGRVVFGVRN
SKRGAAGSLMNVLNYPGMNHRVEITEGILADECAALLCDFYRMPRQVFNAQKKAQSSINSGGS
SGGSSGSETPGTSESATPESSGGSSGGSSEVEFSHEYWMRHALTLAKRARDEREVPVGAVLVL
NNRVIGEGWNRAIGLHDPTAHAEIMAERQGGEVMQNYREIDATEYVTFEPCVMCAGAMIHSRI
GRWFGVRNSKRGAAGSEMNVENYPGMNHRVEITEGIEADECAAEECDFYRMPRQVFNAQKKAQ
SSINSGGSSGGSSGSETPGTSESATPESSGGSSGGSDKKYSIGEAIGTNSVGWAVITDEYKVP
SKKFKVEGNTDRHSIKKNEIGAEEFDSGETAEATREKRTARRRYTRRKNRICYEQEIFSNEMA
KVDDSFFHREEESFEVEEDKKHERHPIFGNIVDEVAYHEKYPTIYHERKKEVDSTDKADEREI
YEAEAHMIKFRGHFEIEGDENPDNSDVDKEFIQEVQTYNQEFEENPINASGVDAKAIESARES
KSRREENEIAQEPGEKKNGEFGNEIAESEGETPNFKSNFDEAEDAKEQESKDTYDDDEDNEEA
QIGDQYADEFEAAKNESDAIEESDIERVNTEITKAPESASMIKRYDEHHQDETEEKAEVRQQE
PEKYKEIFFDQSKNGYAGYIDGGASQEEFYKFIKPIEEKMDGTEEEEVKENREDEERKQRTFD
NGSIPHQIHEGEEHAIERRQEDFYPFEKDNREKIEKIETFRIPYYVGPEARGNSRFAWMTRKS
EETITPWNFEEWDKGASAQSFIERMTNFDKNLPNEKVLPKHSLLYEYFTVYNELTKVKYVTEG
MRKPAFESGEQKKAIVDEEFKTNRKVTVKQEKEDYFKKIECFDSVEISGVEDRFNASEGTYHD
EEKIIKDKDFEDNEENEDIEEDIVETETEFEDREMIEEREKTYAHEFDDKVMKQEKRRRYTGW
GRESRKEINGIRDKQSGKTIEDFEKSDGFANRNFMQEIHDDSETFKEDIQKAQVSGQGDSEHE
HIANEAGSPAIKKGIEQTVKWDEEVKVMGRHKPENIVIEMARENQTTQKGQKNSRERMKRIEE
GIKEEGSQIEKEHPVENTQEQNEKEYEYYEQNGRDMYVDQEEDINRESDYDVDHIVPQSFEKD
DSIDNKVETRSDKNRGKSDNVPSEEVVKKMKNYWRQEENAKEITQRKFDNETKAERGGESEED
KAGFIKRQEVETRQITKHVAQIEDSRMNTKYDENDKEIREVKVITEKSKEVSDFRKDFQFYKV
REINNYHHAHDAYENAVVGTAEIKKYPKEESEFVYGDYKVYDVRKMIAKSEQEIGKATAKYFF
YSNIMNFFKTEITEANGEIRKRPEIETNGETGEIVWDKGRDFATVRKVESMPQVNIVKKTEVQ
TGGFSKESIEPKRNSDKEIARKKDWDPKKYGGFVSPTVAYSVEVVAKVEKGKSKKEKSVKEEE
GITIMERSSFEKNPIDFEEAKGYKEVKKDEIIKEPKYSEFEEENGRKRMEASAREEQKGNEEA
EPSKYVNFEYEASHYEKEKGSPEDNEQKQEFVEQHKHYEDEIIEQISEFSKRVIEADANEDKV
ESAYNKHRDKPIREQAENIIHEFTETNEGAPAAFKYFDTTIDRKQYRSTKEVLDAILIHQSIT
GLYETRIDLSQLGGDSGGSKRTADGSEFEPKKKRKV
ABE8e(TadA-8e V106W)
(SEQ ID NO: 388)
MKRTADGSEFESPKKKRKVSEVEFSHEYWMRHALTLAKRARDEREVPVGAVLVLNNRVIGEGW
NRAIGLHDPTAHAEIMALRQGGLVMQNYRLIDATLYVTFEPCVMCAGAMIHSRIGRVVFGWRN
SKRGAAGSLMNVLNYPGMNHRVEITEGILADECAALLCDFYRMPRQVFNAQKKAQSSINSGGS
SGGSSGSETPGTSESATPESSGGSSGGSDKKYSIGLAIGTNSVGWAVITDEYKVPSKKFKVLG
NTDRHSIKKNLIGALLFDSGETAEATRLKRTARRRYTRRKNRICYLQEIFSNEMAKVDDSFFH
RLEESFLVEEDKKHERHPIFGNIVDEVAYHEKYPTIYHLRKKLVDSTDKADLRLIYLALAHMI
KFRGHFLIEGDLNPDNSDVDKLFIQLVQTYNQLFEENPINASGVDAKAILSARLSKSRRLENL
IAQLPGEKKNGLFGNLIALSLGLTPNFKSNFDLAEDAKLQLSKDTYDDDLDNLLAQIGDQYAD
LFLAAKNLSDAILLSDILRVNTEITKAPLSASMIKRYDEHHQDLTLLKALVRQQLPEKYKEIF
FDQSKNGYAGYIDGGASQEEFYKFIKPILEKMDGTEELLVKLNREDLLRKQRTFDNGSIPHQI
HLGELHAILRRQEDFYPFLKDNREKIEKILTFRIPYYVGPLARGNSRFAWMTRKSEETITPWN
FEEVVDKGASAQSFIERMTNFDKNLPNEKVLPKHSLLYEYFTVYNELTKVKYVTEGMRKPAFL
SGEQKKAIVDLLFKTNRKVTVKQLKEDYFKKIECFDSVEISGVEDRFNASLGTYHDLLKIIKD
KDFLDNEENEDILEDIVLTLTLFEDREMIEERLKTYAHLFDDKVMKQLKRRRYTGWGRLSRKL
INGIRDKQSGKTILDFLKSDGFANRNFMQLIHDDSLTFKEDIQKAQVSGQGDSLHEHIANLAG
SPAIKKGILQTVKVVDELVKVMGRHKPENIVIEMARENQTTQKGQKNSRERMKRIEEGIKELG
SQILKEHPVENTQLQNEKLYLYYLQNGRDMYVDQELDINRLSDYDVDHIVPQSFLKDDSIDNK
VLTRSDKNRGKSDNVPSEEVVKKMKNYWRQLLNAKLITQRKFDNLTKAERGGLSELDKAGFIK
RQLVETRQITKHVAQILDSRMNTKYDENDKLIREVKVITLKSKLVSDFRKDFQFYKVREINNY
HHAHDAYLNAVVGTALIKKYPKLESEFVYGDYKVYDVRKMIAKSEQEIGKATAKYFFYSNIMN
FFKTEITLANGEIRKRPLIETNGETGEIVWDKGRDFATVRKVLSMPQVNIVKKTEVQTGGFSK
ESILPKRNSDKLIARKKDWDPKKYGGFDSPTVAYSVLVVAKVEKGKSKKLKSVKELLGITIME
RSSFEKNPIDFLEAKGYKEVKKDLIIKLPKYSLFELENGRKRMLASAGELQKGNELALPSKYV
NFLYLASHYEKLKGSPEDNEQKQLFVEQHKHYLDEIIEQISEFSKRVILADANLDKVLSAYNK
HRDKPIREQAENIIHLFTLTNLGAPAAFKYFDTTIDRKRYTSTKEVLDATLIHQSITGLYETR
IDLSQLGGDSGGSKRTADGSEFEPKKKRKV

[0375] In some embodiments, the adenine base editor comprises an amino acid sequence that is at least 60%, at least 65%, at least 70%, at least 75%, at least 80%, at least 85%, at least 90%, at least 95%, at least 96%, at least 97%, at least 98%, at least 99%, or at least 99.5% identical to any one of the amino acid sequences set forth in any one of SEQ ID NOs: 373-388, or to any of the base editors described herein. In some embodiments, the base editor comprises an amino acid sequence that has 1, 2, 3, 4, 5, 6, 7, 8, 9, 10, 11, 12, 13, 14, 15, 16, 17, 18, 19, 20, 21, 22, 21, 24, 25, 26, 27, 28, 29, 30, 31, 32, 33, 34, 35, 36, 37, 38, 39, 40, 41, 42, 43, 44, 45, 46, 47, 48, 49, 50, or more mutations compared to any one of the amino acid sequences set forth in SEQ ID NOs: 373-388, or any of the adenine base editors described herein. In some embodiments, the base editor comprises an amino acid sequence that has at least 5, at least 10, at least 15, at least 20, at least 25, at least 30, at least 35, at least 40, at least 45, at least 50, at least 60, at least 70, at least 80, at least 90, at least 100, at least 110, at least 120, at least 130, at least 140, at least 150, at least 160, at least 170, at least 200, at least 300, at least 400, at least 500, at least 600, at least 700, at least 800, at least 900, at least 1000, at least 1100, at least 1200, at least 1300, at least 1400, at least 1500, at least 1600, at least 1700, at least 1750, or at least 1800 identical contiguous amino acid residues as compared to any one of the amino acid sequences set forth in SEQ ID NOs: 373-388, or any of the adenine base editors provided herein. In some embodiments, the base editor (base editor) comprises the amino acid sequence of SEQ ID NO: 380, or a variant thereof that is at least 60%, at least 65%, at least 70%, at least 75%, at least 80%, at least 85%, at least 90%, at least 95%, at least 96%, at least 97%, at least 98%, at least 99%, or at least 99.5% identical.

[0376] In some embodiments, the base editors provided herein are capable of modifying a specific nucleotide base without generating a significant proportion of indels. An “indel”, as used herein, refers to the insertion or deletion of a nucleotide base within a nucleic acid. Such insertions or deletions can lead to frame shift mutations within a coding region of a gene. In some embodiments, it is desirable to generate base editors that efficiently modify (e.g. mutate or deaminate) a specific nucleotide within a nucleic acid, without generating a large number of insertions or deletions (i.e., indels) in the nucleic acid. In certain embodiments, any of the base editors described herein are capable of generating a greater proportion of intended modifications (e.g., point mutations or deaminations) versus indels. In some embodiments, the base editors described herein are capable of generating a ratio of intended point mutations to indels that is greater than 1:1. In some embodiments, the base editors described herein are capable of generating a ratio of intended point mutations to indels that is at least 1.5:1, at least 2:1, at least 2.5:1, at least 3:1, at least 3.5:1, at least 4:1, at least 4.5:1, at least 5:1, at least 5.5:1, at least 6:1, at least 6.5:1, at least 7:1, at least 7.5:1, at least 8:1, at least 10:1, at least 12:1, at least 15:1, at least 20:1, at least 25:1, at least 30:1, at least 40:1, at least 50:1, at least 100:1, at least 200:1, at least 300:1, at least 400:1, at least 500:1, at least 600:1, at least 700:1, at least 800:1, at least 900:1, or at least 1000:1, or more. The number of intended mutations and indels may be determined using any suitable method. In some embodiments, to calculate indel frequencies, sequencing reads are scanned for exact matches to two 10-bp sequences that flank both sides of a window in which indels might occur. If no exact matches are located, the read is excluded from analysis. If the length of this indel window exactly matches the reference sequence the read is classified as not containing an indel. If the indel window is two or more bases longer or shorter than the reference sequence, then the sequencing read is classified as an insertion or deletion, respectively.

[0377] In some embodiments, the base editors described herein are capable of limiting formation of indels in a region of a nucleic acid. In some embodiments, the region is at a nucleotide targeted by a base editor or a region within 2, 3, 4, 5, 6, 7, 8, 9, or 10 nucleotides of a nucleotide targeted by a base editor. In some embodiments, any of the base editors described herein are capable of limiting the formation of indels at a region of a nucleic acid to less than 1%, less than 1.5%, less than 2%, less than 2.5%, less than 3%, less than 3.5%, less than 4%, less than 4.5%, less than 5%, less than 6%, less than 7%, less than 8%, less than 9%, less than 10%, less than 12%, less than 15%, or less than 20%. The number of indels formed at a nucleic acid region may depend on the amount of time a nucleic acid (e.g., a nucleic acid within the genome of a cell) is exposed to a base editor. In some embodiments, an number or proportion of indels is determined after at least 1 hour, at least 2 hours, at least 6 hours, at least 12 hours, at least 24 hours, at least 36 hours, at least 48 hours, at least 3 days, at least 4 days, at least 5 days, at least 7 days, at least 10 days, or at least 14 days of exposing a nucleic acid (e.g., a nucleic acid within the genome of a cell) to a base editor.

[0378] Some aspects of the disclosure are based on the recognition that any of the base editors described herein are capable of efficiently generating an intended mutation, such as a point mutation, in a nucleic acid (e.g. a nucleic acid within a genome of a subject) without generating a significant number of unintended mutations, such as unintended point mutations. In some embodiments, an intended mutation is a mutation that is generated by a specific base editor bound to a gRNA, specifically designed to generate the intended mutation. In some embodiments, the intended mutation is a mutation associated with a disease or disorder. In some embodiments, the intended mutation is an adenine (A) to guanine (G) point mutation associated with a disease or disorder. In some embodiments, the intended mutation is a thymine (T) to cytosine (C) point mutation associated with a disease or disorder. In some embodiments, the intended mutation is an adenine (A) to guanine (G) point mutation within the coding region of a gene. In some embodiments, the intended mutation is a thymine (T) to cytosine (C) point mutation within the coding region of a gene. In some embodiments, the intended mutation is a point mutation that generates a stop codon, for example, a premature stop codon within the coding region of a gene. In some embodiments, the intended mutation is a mutation that eliminates a stop codon. In some embodiments, the intended mutation is a mutation that alters the splicing of a gene. In some embodiments, the intended mutation is a mutation that alters the regulatory sequence of a gene (e.g., a gene promotor or gene repressor). In some embodiments, any of the base editors described herein are capable of generating a ratio of intended mutations to unintended mutations (e.g., intended point mutations:unintended point mutations) that is greater than 1:1. In some embodiments, any of the base editors described herein are capable of generating a ratio of intended mutations to unintended mutations (e.g., intended point mutations:unintended point mutations) that is at least 1.5:1, at least 2:1, at least 2.5:1, at least 3:1, at least 3.5:1, at least 4:1, at least 4.5:1, at least 5:1, at least 5.5:1, at least 6:1, at least 6.5:1, at least 7:1, at least 7.5:1, at least 8:1, at least 10:1, at least 12:1, at least 15:1, at least 20:1, at least 25:1, at least 30:1, at least 40:1, at least 50:1, at least 100:1, at least 150:1, at least 200:1, at least 250:1, at least 500:1, or at least 1000:1, or more. It should be appreciated that the characteristics of the base editors described in the “Base Editor Efficiency” section, herein, may be applied to any of the base editors, or methods of using the base editors described herein.

### Exemplary CBEs

[0379] In some aspects, the methods of the present disclosure provides cytidine base editors (CBEs) comprising a napDNAbp domain and a cytosine deaminase domain that enzymatically deaminates a cytosine nucleobase of a C:G nucleobase pair to a uracil. The uracil may be subsequently converted to a thymine (T) by the cell's DNA repair and replication machinery. The mismatched guanine (G) on the opposite strand may subsequently be converted to an adenine (A) by the cell's DNA repair and replication machinery. In this manner, a target C:G nucleobase pair is ultimately converted to a T:A nucleobase pair.

[0380] In some aspects, the base editing methods of the disclosure comprise the use of an cytidine base editor. Exemplary cytidine base editors include, but are not limited to, BE3, BE3.9max, BE4max, BE4-SaKKH, BE3.9-NG, BE3.9-NRRH, BE4max-VQR, or BE4max-VRQR. In certain embodiments, the cytidine base editor used in the disclosed methods is a BE4max, BE4-SaKKH, BE4max-VQR, or BE4max-VRQR. Other CBEs may be used to deaminate a C nucleobase in accordance with the disclosed methods.

[0381] In some aspects, the disclosure provides complexes of base editors and guide RNAs that comprise a CBE. Exemplary cytidine base editors of the disclosed complexes include, but are not limited to, BE3, BE3.9max, BE4max, BE4-SaKKH, BE3.9-NG, BE3.9-NRRH, BE4max-VQR, or BE4max-VRQR. In certain embodiments, the cytidine base editor used in the disclosed complexes is a BE4max, BE4-SaKKH, BE4max-VQR, or BE4max-VRQR. Other CBEs may be used to deaminate a C nucleobase in accordance with the disclosed complexes.

[0382] Exemplary complexes of CBEs may provide an off-target editing frequency of less than 2.0% after being contacted with a nucleic acid molecule comprising a target sequence, e.g., a target nucleobase pair. Further exemplary CBE complexes provide an off-target editing frequency of less than 1.5% after being contacted with a nucleic acid molecule comprising a target sequence comprising a target nucleobase pair. Further exemplary CBE complexes may provide an off-target editing frequency of less than 1.25%, less than 1.1%, less than 1%, less than 0.75%, less than 0.5%, less than 0.4%, less than 0.25%, less than 0.2%, less than 0.15%, less than 0.1%, less than 0.05%, or less than 0.025%, after being contacted with a nucleic acid molecule comprising a target sequence.

[0383] For instance, the cytidine base editors YE1-BE4, YE1-CP1028, YE1-SpCas9-NG (also referred to herein as YE1-NG), R33A-BE4, and R33A+K34A-BE4-CP1028, which are described below, may exhibit off-target editing frequencies of less than 0.75% (e.g., about 0.4% or less) while maintaining on-target editing efficiencies of about 60% or more, in target sequences in mammalian cells. Each of these base editors comprises modified cytosine deaminases (e.g., YE1, R33A, or R33A+K34A) and may further comprise a modified napDNAbp domain such as a circularly permuted Cas9 domain (e.g., CP1028) or a Cas9 domain with an expanded PAM window (e.g., SpCas9-NG). These five base editors may be the most preferred for applications in which off-target editing, and in particular Cas9-independent off-target editing, must be minimized. In particular, base editors comprising a YE1 deaminase domain provide efficient on-target editing with greatly decreased Cas9-independent editing, as confirmed by whole-genome sequencing.

[0384] Exemplary CBEs may further possess an on-target editing efficiency of more than 50% after being contacted with a nucleic acid molecule comprising a target sequence. Further exemplary CBEs possess an on-target editing efficiency of more than 60% after being contacted with a nucleic acid molecule comprising a target sequence. Further exemplary CBEs possess an on-target editing efficiency of more than 65%, more than 70%, more than 75%, more than 80%, more than 82.5%, or more than 85% after being contacted with a nucleic acid molecule comprising a target sequence. The disclosed CBEs may exhibit indel frequencies of less than 0.75%, less than 0.6%, less than 0.5%, less than 0.4%, less than 0.3%, or less than 0.2% after being contacted with a nucleic acid molecule containing a target sequence.

[0385] The disclosed CBEs may further comprise one or more nuclear localization signals (NLSs) and/or two or more uracil glycosylase inhibitor (UGI) domains. Thus, the base editors may comprise the structure: NH₂-[first nuclear localization sequence]-[cytosine deaminase domain]-[napDNAbp domain]-[first UGI domain]-[second UGI domain]-[second nuclear localization sequence]-COOH, wherein each instance of “]-[” indicates the presence of an optional linker sequence. Exemplary CBEs may have a structure that comprises the “BE4max” architecture, with an NH₂-[NLS]-[cytosine deaminase]-[Cas9 nickase]-[UGI domain]-[UGI domain]-[NLS]-COOH structure, having optimized nuclear localization signals and wherein the napDNAbp domain comprises a Cas9 nickase. This BE4max structure was reported to have optimized codon usage for expression in human cells, as reported in Koblan et al., Nat Biotechnol. 2018; 36(9):843-846, herein incorporated by reference.

[0386] In other embodiments, exemplary CBEs may have a structure that comprises a modified BE4max architecture that contains a napDNAbp domain comprising a Cas9 variant other than Cas9 nickase, such as SpCas9-NG, xCas9, or circular permutant CP1028. Accordingly, exemplary CBEs may comprise the structure: NH₂-[NLS]-[cytosine deaminase]-[xCas9]-[UGI domain]-[UGI domain][NLS]-COOH; or NH₂-[NLS]cytosine deaminase]-[SpCas9-NG]-[UGI domain]-[UGI domain][NLS]-COOH, wherein each instance of “]-[” indicates the presence of an optional linker sequence.

[0387] The disclosed CBEs may comprise modified (or evolved) cytosine deaminase domains, such as deaminase domains that recognize an expanded PAM sequence, have improved efficiency of deaminating 5′-GC targets, and/or make edits in a narrower target window, In some embodiments, the disclosed cytidine base editors comprise evolved nucleic acid programmable DNA binding proteins (napDNAbp), such as an evolved Cas9.

[0388] In some embodiments, exemplary CBEs for use in the present disclosure include those from Gaudelli et al. Nat. Commun. (2020) 11:2052, incorporated by reference herein. These base editors include, but are not limited to, a base editor comprising a sequence that is at least 90%, at least 95%, at least 98%, at least 99%, or at least 99.5% identical to the sequences reported therein for next-generation BE4 mutants BE4-PpAPOBEC1, BE4-PpAPOBEC1 H122A, BE4-PpAPOBEC1 R33A, BE4-RrA3F, BE4-RrA3F F130L, BE4-AmAPOBEC1, BE4-SsAPOBEC3B, and BE4-SsAPOBEC3B R54Q.

[0389] In some embodiments, exemplary CBEs for use in the present disclosure include those provided in Gehrke, et al. An APOBEC3A-Cas9 base editor with minimized bystander and off-target activities, Nat. Biotechnol. 36(10), 977-982 (2018); and Lee et al. Single C-to-T substitution using engineered APOBEC3G-nCas9 base editors with minimum genome- and transcriptome-wide off-target effects, Science Advances 6, eaba1773 (2020), each of which are incorporated by reference herein. Gehrke et al. provides APOBEC3A-BE3 variants having N57G, N57A, and N57Q/Y130F mutations in the APOBEC3A deaminase domain; and Lee et al. provides APOBEC3F-nCas9 variants (A3G-BE4.4, A3G-BE5.13, and A3G-BE5.14), which contain mutations in the APOBEC3G deaminase domain and exhibit high editing efficiencies and precision in the context of a CC target sequence motif.

[0390] In some embodiments, exemplary CBEs for use in the present disclosure include those provided in WO 2020/051562, published Mar. 12, 2020, which discloses multi-effector cytosine base editors having two napDNAbp domains (dCas9 and Cas9n), cytidine deaminase domain and and a UGI domain. In some embodiments, exemplary CBEs for use in the present disclosure include those provided in WO 2020/028823, published Feb. 6, 2020, which discloses multi-effector base editors having a pmCDA cytidine deaminase domain, a TadA7.10 adenosine deaminase domain, a UGI domain, and a Cas9n domain.

[0391] Exemplary cytidine base editors comprise sequences that are at least least 85%, at least 90%, at least 95%, at least 98%, at least 99%, or at least 99.5% identical to the following amino acid sequences, SEQ ID NOs: 350-372.

[0392] Where indicated, “BE4-” and “-BE4” refer to the BE4max architecture, or NH₂-[first nuclear localization sequence]-[cytosine deaminase domain]-[32aa linker]-[SpCas9 nickase (nCas9, or nSpCas9) domain]-[9aa linker]-[first UGI domain]-[9aa-linker]-[second UGI domain]-[second nuclear localization sequence]-COOH. Where indicated, “BE4max, modified with SpCas9-NG” and “-SpCas9-NG” refer to a modified BE4max architecture in which the SpCas9 nickase domain has been replaced with an SpCas9-NG, i.e., NH₂-[first nuclear localization sequence]-[cytosine deaminase domain]-[32aa linker]-[SpCas9-NG]-[9aa linker]-[first UGI domain]-[9aa-linker]-[second UGI domain]-[second nuclear localization sequence]-COOH.

[0393] As discussed above, preferred base editors comprise modified cytosine deaminases (e.g., YE1, R33A, or R33A+K34A) and may further comprise a modified napDNAbp domain such as a Cas9 domain with an expanded PAM window (e.g., SpCas9-NG). The napDNAbp domains in the following amino acid sequences are indicated in italics.

BE4max
(SEQ ID NO: 350)
MKRTADGSEFESPKKKRKVSSETGPVAVDPTLRRRIEPHEFEVFFDPRELRKETCLLYEINWG
GRHSIWRHTSQNTNKHVEVNFIEKFTTERYFCPNTRCSITWFLSWSPCGECSRAITEFLSRYP
HVTLFIYIARLYHHADPRNRQGLRDLISSGVTIQIMTEQESGYCWRNFVNYSPSNEAHWPRYP
HLWVRLYVLELYCIILGLPPCLNILRRKQPQLTFFTIALQSCHYQRLPPHILWATGLKSGGSS
GGSSGSETPGTSESATPESSGGSSGGSDKKYSIGLAIGTNSVGWAVITDEYKVPSKKFKVLGN
TDRHSIKKNLIGALLFDSGETAEATRLKRTARRRYTRRKNRICYEQEIFSNEMAKVDDSFFHR
EEESFEVEEDKKHERHPIFGNIVDEVAYHEKYPTIYHERKKEVDSTDKADEREIYEAEAHMIK
FRGHFEIEGDENPDNSDVDKEFIQEVQTYNQEFEENPINASGVDAKAIESARESKSRREENEI
AQEPGEKKNGEFGNEIAESEGETPNFKSNFDEAEDAKEQESKDTYDDDEDNEEAQIGDQYADE
FEAAKNESDAIEESDIERVNTEITKAPESASMIKRYDEHHQDETEEKAEVRQQEPEKYKEIFF
DQSKNGYAGYIDGGASQEEFYKFIKPIEEKMDGTEEEEVKENREDEERKQRTFDNGSIPHQIH
EGEEHAIERRQEDFYPFEKDNREKIEKIETFRIPYYVGPEARGNSRFAWMTRKSEETITPWNF
EEVVDKGASAQSFIERMTNFDKNEPNEKVEPKHSEEYEYFTVYNEETKVKYVTEGMRKPAFES
GEQKKAIVDEEFKTNRKVTVKQEKEDYFKKIECFDSVEISGVEDRFNASEGTYHDEEKIIKDK
DFEDNEENEDIEEDIVETETEFEDREMIEERLKTYAHLFDDKVMKQLKRRRYTGWGRLSRKLI
NGIRDKQSGKTILDFLKSDGFANRNFMQEIHDDSETFKEDIQKAQVSGQGDSEHEHIANEAGS
PAIKKGIEQTVKVVDEEVKVMGRHKPENIVIEMARENQTTQKGQKNSRERMKRIEEGIKEEGS
QIEKEHPVENTQEQNEKEYEYYEQNGRDMYVDQEEDINRESDYDVDHIVPQSFEKDDSIDNKV
ETRSDKNRGKSDNVPSEEWKKMKNYWRQEENAKEITQRKFDNETKAERGGESEEDKAGFIKRQ
EVETRQITKHVAQILDSRMNTKYDENDKLIREVKVITLKSKLVSDFRKDFQFYKVREINNYHH
AHDAYLNAVVGTAEIKKYPKEESEFVYGDYKVYDVRKMIAKSEQEIGKATAKYFFYSNIMNFF
KTEITEANGEIRKRPEIETNGETGEIVWDKGRDFATVRKVESMPQVNIVKKTEVQTGGFSKES
IEPKRNSDKEIARKKDWDPKKYGGFDSPTVAYSVEWAKVEKGKSKKEKSVKEEEGITIMERSS
FEKNPIDFEEAKGYKEVKKDEIIKEPKYSEFEEENGRKRMEASAGEEQKGNEEAEPSKYVNFE
YEASHYEKEKGSPEDNEQKQEFVEQHKHYEDEIIEQISEFSKRVIEADANEDKVESAYNKHRD
KPIREQAENIIHEFTETNEGAPAAFKYFDTTIDRKRYTSTKEVEDATEIHQSITGEYETRIDL
SQLGGDSGGSGGSGGSTNLSDIIEKETGKQLVIQESILMLPEEVEEVIGNKPESDILVHTAYD
ESTDENVMLLTSDAPEYKPWALVIQDSNGENKIKMLSGGSGGSGGSTNLSDIIEKETGKQLVI
QESILMLPEEVEEVIGNKPESDILVHTAYDESTDENVMLLTSDAPEYKPWALVIQDSNGENKI
KMLSGGSKRTADGSEFEPKKKRKV
YE1-BE4
(SEQ ID NO: 351)
MKRTADGSEFESPKKKRKVSSETGPVAVDPTLRRRIEPHEFEVFFDPRELRKETCLLYEINWG
GRHSIWRHTSQNTNKHVEVNFIEKFTTERYFCPNTRCSITWFLSYSPCGECSRAITEFLSRYP
HVTLFIYIARLYHHADPENRQGLRDLISSGVTIQIMTEQESGYCWRNFVNYSPSNEAHWPRYP
HLWVRLYVLELYCIILGLPPCLNILRRKQPQLTFFTIALQSCHYQRLPPHILWATGLKSGGSS
GGSSGSETPGTSESATPESSGGSSGGSDKKYSIGLAIGTNSVGWAVITDEYKVPSKKFKVEGN
TDRHSIKKNEIGAEEFDSGETAEATRLKRTARRRYTRRKNRICYEQEIFSNEMAKVDDSFFHR
EEESFEVEEDKKHERHPIFGNIVDEVAYHEKYPTIYHERKKEVDSTDKADEREIYEAEAHMIK
FRGHFEIEGDENPDNSDVDKEFIQEVQTYNQEFEENPINASGVDAKAIESARESKSRREENEI
AQEPGEKKNGEFGNEIAESEGETPNFKSNFDEAEDAKEQESKDTYDDDEDNEEAQIGDQYADE
FEAAKNESDAIEESDIERVNTEITKAPESASMIKRYDEHHQDETEEKAEVRQQEPEKYKEIFF
DQSKNGYAGYIDGGASQEEFYKFIKPIEEKMDGTEEEEVKENREDEERKQRTFDNGSIPHQIH
EGEEHAIERRQEDFYPFEKDNREKIEKIETFRIPYYVGPEARGNSRFAWMTRKSEETITPWNF
EEVVDKGASAQSFIERMTNFDKNEPNEKVEPKHSEEYEYFTVYNEETKVKYVTEGMRKPAFES
GEQKKAIVDEEFKTNRKVTVKQEKEDYFKKIECFDSVEISGVEDRFNASEGTYHDEEKIIKDK
DFEDNEENEDIEEDIVETETEFEDREMIEEREKTYAHEFDDKVMKQEKRRRYTGWGRESRKEI
NGIRDKQSGKTIEDFEKSDGFANRNFMQEIHDDSETFKEDIQKAQVSGQGDSEHEHIANEAGS
PAIKKGIEQTVKVVDEEVKVMGRHKPENIVIEMARENQTTQKGQKNSRERMKRIEEGIKELGS
QILKEHPVENTQLQNEKEYEYYEQNGRDMYVDQEEDINRESDYDVDHIVPQSFEKDDSIDNKV
ETRSDKNRGKSDNVPSEEWKKMKNYWRQEENAKEITQRKFDNETKAERGGESEEDKAGFIKRQ
EVETRQITKHVAQILDSRMNTKYDENDKLIREVKVITLKSKLVSDFRKDFQFYKVREINNYHH
AHDAYLNAVVGTAEIKKYPKEESEFVYGDYKVYDVRKMIAKSEQEIGKATAKYFFYSNIMNFF
KTEITEANGEIRKRPEIETNGETGEIVWDKGRDFATVRKVESMPQVNIVKKTEVQTGGFSKES
IEPKRNSDKEIARKKDWDPKKYGGFDSPTVAYSVEWAKVEKGKSKKEKSVKEEEGITIMERSS
FEKNPIDFEEAKGYKEVKKDEIIKEPKYSEFEEENGRKRMEASAGEEQKGNEEAEPSKYVNFE
YEASHYEKEKGSPEDNEQKQEFVEQHKHYEDEIIEQISEFSKRVIEADANEDKVESAYNKHRD
KPIREQAENIIHEFTETNEGAPAAFKYFDTTIDRKRYTSTKEVEDATEIHQSITGEYETRIDL
SQLGGDSGGSGGSGGSTNLSDIIEKETGKQLVIQESILMLPEEVEEVIGNKPESDILVHTAYD
ESTDENVMLLTSDAPEYKPWALVIQDSNGENKIKMLSGGSGGSGGSTNLSDIIEKETGKQLVI
QESILMLPEEVEEVIGNKPESDILVHTAYDESTDENVMLLTSDAPEYKPWALVIQDSNGENKI
KMLSGGSKRTADGSEFEPKKKRKV
YE2-BE4
(SEQ ID NO: 352)
MKRTADGSEFESPKKKRKVSSETGPVAVDPTLRRRIEPHEFEVFFDPRELRKETCLLYEINWG
GRHSIWRHTSQNTNKHVEVNFIEKFTTERYFCPNTRCSITWFLSYSPCGECSRAITEFLSRYP
HVTLFIYIARLYHHADPRNRQGLEDLISSGVTIQIMTEQESGYCWRNFVNYSPSNEAHWPRYP
HLWVRLYVLELYCIILGLPPCLNILRRKQPQLTFFTIALQSCHYQRLPPHILWATGLKSGGSS
GGSSGSETPGTSESATPESSGGSSGGSDKKYSIGLAIGTNSVGWAVITDEYKVPSKKFKVEGN
TDRHSIKKNEIGAEEFDSGETAEATRLKRTARRRYTRRKNRICYEQEIFSNEMAKVDDSFFHR
EEESFEVEEDKKHERHPIFGNIVDEVAYHEKYPTIYHERKKEVDSTDKADEREIYEAEAHMIK
FRGHFEIEGDENPDNSDVDKEFIQEVQTYNQEFEENPINASGVDAKAIESARESKSRREENEI
AQEPGEKKNGEFGNEIAESEGETPNFKSNFDEAEDAKEQESKDTYDDDEDNEEAQIGDQYADE
FEAAKNESDAIEESDIERVNTEITKAPESASMIKRYDEHHQDETEEKAEVRQQEPEKYKEIFF
DQSKNGYAGYIDGGASQEEFYKFIKPIEEKMDGTEEEEVKENREDEERKQRTFDNGSIPHQIH
EGEEHAIERRQEDFYPFEKDNREKIEKIETFRIPYYVGPEARGNSRFAWMTRKSEETITPWNF
EEVVDKGASAQSFIERMTNFDKNEPNEKVEPKHSEEYEYFTVYNEETKVKYVTEGMRKPAFES
GEQKKAIVDEEFKTNRKVTVKQEKEDYFKKIECFDSVEISGVEDRFNASEGTYHDEEKIIKDK
DFEDNEENEDIEEDIVETETEFEDREMIEEREKTYAHEFDDKVMKQEKRRRYTGWGRESRKEI
NGIRDKQSGKTIEDFEKSDGFANRNFMQEIHDDSETFKEDIQKAQVSGQGDSEHEHIANEAGS
PAIKKGIEQTVKVVDEEVKVMGRHKPENIVIEMARENQTTQKGQKNSRERMKRIEEGIKEEGS
QIEKEHPVENTQEQNEKEYEYYEQNGRDMYVDQEEDINRESDYDVDHIVPQSFEKDDSIDNKV
ETRSDKNRGKSDNVPSEEWKKMKNYWRQLLNAKLITQRKFDNLTKAERGGLSELDKAGFIKRQ
LVETRQITKHVAQILDSRMNTKYDENDKLIREVKVITLKSKLVSDFRKDFQFYKVREINNYHH
AHDAYLNAVVGTAEIKKYPKEESEFVYGDYKVYDVRKMIAKSEQEIGKATAKYFFYSNIMNFF
KTEITEANGEIRKRPEIETNGETGEIVWDKGRDFATVRKVESMPQVNIVKKTEVQTGGFSKES
IEPKRNSDKEIARKKDWDPKKYGGFDSPTVAYSVEWAKVEKGKSKKEKSVKEEEGITIMERSS
FEKNPIDFEEAKGYKEVKKDEIIKEPKYSEFEEENGRKRMEASAGEEQKGNEEAEPSKYVNFE
YEASHYEKEKGSPEDNEQKQEFVEQHKHYEDEIIEQISEFSKRVIEADANEDKVESAYNKHRD
KPIREQAENIIHEFTETNEGAPAAFKYFDTTIDRKRYTSTKEVEDATEIHQSITGEYETRIDL
SQLGGDSGGSGGSGGSTNLSDIIEKETGKQLVIQESILMLPEEVEEVIGNKPESDILVHTAYD
ESTDENVMLLTSDAPEYKPWALVIQDSNGENKIKMLSGGSGGSGGSTNLSDIIEKETGKQLVI
QESILMLPEEVEEVIGNKPESDILVHTAYDESTDENVMLLTSDAPEYKPWALVIQDSNGENKI
KMLSGGSKRTADGSEFEPKKKRKV
YEE-BE4
(SEQ ID NO: 353)
MKRTADGSEFESPKKKRKVSSETGPVAVDPTLRRRIEPHEFEVFFDPRELRKETCLLYEINWG
GRHSIWRHTSQNTNKHVEVNFIEKFTTERYFCPNTRCSITWFLSYSPCGECSRAITEFLSRYP
HVTLFIYIARLYHHADPENRQGLEDLISSGVTIQIMTEQESGYCWRNFVNYSPSNEAHWPRYP
HLWVRLYVLELYCIILGLPPCLNILRRKQPQLTFFTIALQSCHYQRLPPHILWATGLKSGGSS
GGSSGSETPGTSESATPESSGGSSGGSDKKYSIGLAIGTNSVGWAVITDEYKVPSKKFKVEGN
TDRHSIKKNEIGAEEFDSGETAEATRLKRTARRRYTRRKNRICYEQEIFSNEMAKVDDSFFHR
EEESFEVEEDKKHERHPIFGNIVDEVAYHEKYPTIYHERKKEVDSTDKADEREIYEAEAHMIK
FRGHFEIEGDENPDNSDVDKEFIQEVQTYNQEFEENPINASGVDAKAIESARESKSRREENEI
AQEPGEKKNGEFGNEIAESEGETPNFKSNFDEAEDAKEQESKDTYDDDEDNEEAQIGDQYADE
FEAAKNESDAIEESDIERVNTEITKAPESASMIKRYDEHHQDETEEKAEVRQQEPEKYKEIFF
DQSKNGYAGYIDGGASQEEFYKFIKPIEEKMDGTEEEEVKENREDEERKQRTFDNGSIPHQIH
EGEEHAIERRQEDFYPFEKDNREKIEKIETFRIPYYVGPEARGNSRFAWMTRKSEETITPWNF
EEVVDKGASAQSFIERMTNFDKNEPNEKVEPKHSEEYEYFTVYNEETKVKYVTEGMRKPAFES
GEQKKAIVDEEFKTNRKVTVKQEKEDYFKKIECFDSVEISGVEDRFNASEGTYHDEEKIIKDK
DFEDNEENEDIEEDIVETETEFEDREMIEEREKTYAHEFDDKVMKQEKRRRYTGWGRESRKEI
NGIRDKQSGKTIEDFEKSDGFANRNFMQEIHDDSETFKEDIQKAQVSGQGDSEHEHIANEAGS
PAIKKGIEQTVKVVDEEVKVMGRHKPENIVIEMARENQTTQKGQKNSRERMKRIEEGIKEEGS
QIEKEHPVENTQEQNEKEYEYYEQNGRDMYVDQEEDINRESDYDVDHIVPQSFEKDDSIDNKV
ETRSDKNRGKSDNVPSEEWKKMKNYWRQEENAKEITQRKFDNETKAERGGESEEDKAGFIKRQ
EVETRQITKHVAQIEDSRMNTKYDENDKEIREVKVITEKSKEVSDFRKDFQFYKVREINNYHH
AHDAYENAVVGTALIKKYPKLESEFVYGDYKVYDVRKMIAKSEQEIGKATAKYFFYSNIMNFF
KTEITLANGEIRKRPEIETNGETGEIVWDKGRDFATVRKVESMPQVNIVKKTEVQTGGFSKES
IEPKRNSDKEIARKKDWDPKKYGGFDSPTVAYSVEWAKVEKGKSKKEKSVKEEEGITIMERSS
FEKNPIDFEEAKGYKEVKKDEIIKEPKYSEFEEENGRKRMEASAGEEQKGNEEAEPSKYVNFE
YEASHYEKEKGSPEDNEQKQEFVEQHKHYEDEIIEQISEFSKRVIEADANEDKVESAYNKHRD
KPIREQAENIIHEFTETNEGAPAAFKYFDTTIDRKRYTSTKEVEDATEIHQSITGEYETRIDL
SQLGGDSGGSGGSGGSTNLSDIIEKETGKQLVIQESILMLPEEVEEVIGNKPESDILVHTAYD
ESTDENVMLLTSDAPEYKPWALVIQDSNGENKIKMLSGGSGGSGGSTNLSDIIEKETGKQLVI
QESILMLPEEVEEVIGNKPESDILVHTAYDESTDENVMLLTSDAPEYKPWALVIQDSNGENKI
KMLSGGSKRTADGSEFEPKKKRKV
EE-BE4
(SEQ ID NO: 354)
MKRTADGSEFESPKKKRKVSSETGPVAVDPTLRRRIEPHEFEVFFDPRELRKETCLLYEINWG
GRHSIWRHTSQNTNKHVEVNFIEKFTTERYFCPNTRCSITWFLSWSPCGECSRAITEFLSRYP
HVTLFIYIARLYHHADPENRQGLEDLISSGVTIQIMTEQESGYCWRNFVNYSPSNEAHWPRYP
HLWVRLYVLELYCIILGLPPCLNILRRKQPQLTFFTIALQSCHYQRLPPHILWATGLKSGGSS
GGSSGSETPGTSESATPESSGGSSGGSDKKYSIGLAIGTNSVGWAVITDEYKVPSKKFKVEGN
TDRHSIKKNEIGAEEFDSGETAEATRLKRTARRRYTRRKNRICYEQEIFSNEMAKVDDSFFHR
EEESFEVEEDKKHERHPIFGNIVDEVAYHEKYPTIYHERKKEVDSTDKADEREIYEAEAHMIK
FRGHFEIEGDENPDNSDVDKEFIQEVQTYNQEFEENPINASGVDAKAIESARESKSRREENEI
AQEPGEKKNGEFGNEIAESEGETPNFKSNFDEAEDAKEQESKDTYDDDEDNEEAQIGDQYADE
FEAAKNESDAIEESDIERVNTEITKAPESASMIKRYDEHHQDETEEKAEVRQQEPEKYKEIFF
DQSKNGYAGYIDGGASQEEFYKFIKPIEEKMDGTEEEEVKENREDEERKQRTFDNGSIPHQIH
EGEEHAIERRQEDFYPFEKDNREKIEKIETFRIPYYVGPEARGNSRFAWMTRKSEETITPWNF
EEVVDKGASAQSFIERMTNFDKNEPNEKVEPKHSEEYEYFTVYNEETKVKYVTEGMRKPAFES
GEQKKAIVDEEFKTNRKVTVKQEKEDYFKKIECFDSVEISGVEDRFNASEGTYHDEEKIIKDK
DFEDNEENEDIEEDIVETETEFEDREMIEEREKTYAHEFDDKVMKQEKRRRYTGWGRESRKEI
NGIRDKQSGKTIEDFEKSDGFANRNFMQEIHDDSETFKEDIQKAQVSGQGDSEHEHIANEAGS
PAIKKGIEQTVKVVDEEVKVMGRHKPENIVIEMARENQTTQKGQKNSRERMKRIEEGIKEEGS
QIEKEHPVENTQEQNEKEYEYYEQNGRDMYVDQEEDINRESDYDVDHIVPQSFEKDDSIDNKV
ETRSDKNRGKSDNVPSEEWKKMKNYWRQEENAKEITQRKFDNETKAERGGESEEDKAGFIKRQ
EVETRQITKHVAQILDSRMNTKYDENDKLIREVKVITLKSKLVSDFRKDFQFYKVREINNYHH
AHDAYLNAVVGTAEIKKYPKEESEFVYGDYKVYDVRKMIAKSEQEIGKATAKYFFYSNIMNFF
KTEITEANGEIRKRPEIETNGETGEIVWDKGRDFATVRKVESMPQVNIVKKTEVQTGGFSKES
IEPKRNSDKLIARKKDWDPKKYGGFDSPTVAYSVLWAKVEKGKSKKLKSVKELLGITIMERSS
FEKNPIDFEEAKGYKEVKKDEIIKEPKYSEFEEENGRKRMEASAGEEQKGNEEAEPSKYVNFE
YEASHYEKEKGSPEDNEQKQEFVEQHKHYEDEIIEQISEFSKRVIEADANEDKVESAYNKHRD
KPIREQAENIIHEFTETNEGAPAAFKYFDTTIDRKRYTSTKEVEDATEIHQSITGEYETRIDL
SQLGGDSGGSGGSGGSTNLSDIIEKETGKQLVIQESILMLPEEVEEVIGNKPESDILVHTAYD
ESTDENVMLLTSDAPEYKPWALVIQDSNGENKIKMLSGGSGGSGGSTNLSDIIEKETGKQLVI
QESILMLPEEVEEVIGNKPESDILVHTAYDESTDENVMLLTSDAPEYKPWALVIQDSNGENKI
KMLSGGSKRTADGSEFEPKKKRKV
R33A-BE4
(SEQ ID NO: 355)
MKRTADGSEFESPKKKRKVSSETGPVAVDPTLRRRIEPHEFEVFFDPRELAKETCLLYEINWG
GRHSIWRHTSQNTNKHVEVNFIEKFTTERYFCPNTRCSITWFLSWSPCGECSRAITEFLSRYP
HVTLFIYIARLYHHADPRNRQGLRDLISSGVTIQIMTEQESGYCWRNFVNYSPSNEAHWPRYP
HLWVRLYVLELYCIILGLPPCLNILRRKQPQLTFFTIALQSCHYQRLPPHILWATGLKSGGSS
GGSSGSETPGTSESATPESSGGSSGGSDKKYSIGLAIGTNSVGWAVITDEYKVPSKKFKVEGN
TDRHSIKKNEIGAEEFDSGETAEATRLKRTARRRYTRRKNRICYEQEIFSNEMAKVDDSFFHR
EEESFEVEEDKKHERHPIFGNIVDEVAYHEKYPTIYHERKKEVDSTDKADEREIYEAEAHMIK
FRGHFEIEGDENPDNSDVDKEFIQEVQTYNQEFEENPINASGVDAKAIESARESKSRREENEI
AQEPGEKKNGEFGNEIAESEGETPNFKSNFDEAEDAKEQESKDTYDDDEDNEEAQIGDQYADE
FEAAKNESDAIEESDIERVNTEITKAPESASMIKRYDEHHQDETEEKAEVRQQEPEKYKEIFF
DQSKNGYAGYIDGGASQEEFYKFIKPIEEKMDGTEEEEVKENREDEERKQRTFDNGSIPHQIH
EGEEHAIERRQEDFYPFEKDNREKIEKIETFRIPYYVGPEARGNSRFAWMTRKSEETITPWNF
EEVVDKGASAQSFIERMTNFDKNEPNEKVEPKHSEEYEYFTVYNEETKVKYVTEGMRKPAFES
GEQKKAIVDEEFKTNRKVTVKQEKEDYFKKIECFDSVEISGVEDRFNASEGTYHDEEKIIKDK
DFEDNEENEDIEEDIVETETEFEDREMIEEREKTYAHEFDDKVMKQEKRRRYTGWGRESRKEI
NGIRDKQSGKTIEDFEKSDGFANRNFMQEIHDDSETFKEDIQKAQVSGQGDSEHEHIANEAGS
PAIKKGIEQTVKVVDEEVKVMGRHKPENIVIEMARENQTTQKGQKNSRERMKRIEEGIKEEGS
QIEKEHPVENTQEQNEKEYEYYEQNGRDMYVDQEEDINRESDYDVDHIVPQSFEKDDSIDNKV
ETRSDKNRGKSDNVPSEEWKKMKNYWRQEENAKEITQRKFDNETKAERGGESEEDKAGFIKRQ
EVETRQITKHVAQILDSRMNTKYDENDKLIREVKVITLKSKLVSDFRKDFQFYKVREINNYHH
AHDAYLNAVVGTAEIKKYPKEESEFVYGDYKVYDVRKMIAKSEQEIGKATAKYFFYSNIMNFF
KTEITEANGEIRKRPEIETNGETGEIVWDKGRDFATVRKVESMPQVNIVKKTEVQTGGFSKES
IEPKRNSDKEIARKKDWDPKKYGGFDSPTVAYSVEWAKVEKGKSKKEKSVKEEEGITIMERSS
FEKNPIDFEEAKGYKEVKKDEIIKEPKYSEFEEENGRKRMEASAGEEQKGNEEAEPSKYVNFL
YLASHYEKLKGSPEDNEQKQLFVEQHKHYLDEIIEQISEFSKRVILADANLDKVLSAYNKHRD
KPIREQAENIIHEFTETNEGAPAAFKYFDTTIDRKRYTSTKEVEDATEIHQSITGEYETRIDL
SQLGGDSGGSGGSGGSTNLSDIIEKETGKQLVIQESILMLPEEVEEVIGNKPESDILVHTAYD
ESTDENVMLLTSDAPEYKPWALVIQDSNGENKIKMLSGGSGGSGGSTNLSDIIEKETGKQLVI
QESILMLPEEVEEVIGNKPESDILVHTAYDESTDENVMLLTSDAPEYKPWALVIQDSNGENKI
KMLSGGSKRTADGSEFEPKKKRKV
R33A + K34A-BE4
(SEQ ID NO: 356)
MKRTADGSEFESPKKKRKVSSETGPVAVDPTLRRRIEPHEFEVFFDPRELAAETCLLYEINWG
GRHSIWRHTSQNTNKHVEVNFIEKFTTERYFCPNTRCSITWFLSWSPCGECSRAITEFLSRYP
HVTLFIYIARLYHHADPRNRQGLRDLISSGVTIQIMTEQESGYCWRNFVNYSPSNEAHWPRYP
HLWVRLYVLELYCIILGLPPCLNILRRKQPQLTFFTIALQSCHYQRLPPHILWATGLKSGGSS
GGSSGSETPGTSESATPESSGGSSGGSDKKYSIGLAIGTNSVGWAVITDEYKVPSKKFKVEGN
TDRHSIKKNEIGAEEFDSGETAEATRLKRTARRRYTRRKNRICYEQEIFSNEMAKVDDSFFHR
EEESFEVEEDKKHERHPIFGNIVDEVAYHEKYPTIYHERKKEVDSTDKADEREIYEAEAHMIK
FRGHFEIEGDENPDNSDVDKEFIQEVQTYNQEFEENPINASGVDAKAIESARESKSRREENEI
AQEPGEKKNGEFGNEIAESEGETPNFKSNFDEAEDAKEQESKDTYDDDEDNEEAQIGDQYADE
FEAAKNESDAIEESDIERVNTEITKAPESASMIKRYDEHHQDETEEKAEVRQQEPEKYKEIFF
DQSKNGYAGYIDGGASQEEFYKFIKPIEEKMDGTEEEEVKENREDEERKQRTFDNGSIPHQIH
EGEEHAIERRQEDFYPFEKDNREKIEKIETFRIPYYVGPEARGNSRFAWMTRKSEETITPWNF
EEVVDKGASAQSFIERMTNFDKNEPNEKVEPKHSEEYEYFTVYNEETKVKYVTEGMRKPAFES
GEQKKAIVDEEFKTNRKVTVKQEKEDYFKKIECFDSVEISGVEDRFNASEGTYHDEEKIIKDK
DFEDNEENEDIEEDIVETETEFEDREMIEEREKTYAHEFDDKVMKQEKRRRYTGWGRESRKEI
NGIRDKQSGKTIEDFEKSDGFANRNFMQEIHDDSETFKEDIQKAQVSGQGDSEHEHIANEAGS
PAIKKGIEQTVKVVDEEVKVMGRHKPENIVIEMARENQTTQKGQKNSRERMKRIEEGIKEEGS
QIEKEHPVENTQEQNEKEYEYYEQNGRDMYVDQEEDINRESDYDVDHIVPQSFEKDDSIDNKV
ETRSDKNRGKSDNVPSEEWKKMKNYWRQEENAKEITQRKFDNETKAERGGESEEDKAGFIKRQ
EVETRQITKHVAQILDSRMNTKYDENDKLIREVKVITLKSKLVSDFRKDFQFYKVREINNYHH
AHDAYLNAVVGTAEIKKYPKEESEFVYGDYKVYDVRKMIAKSEQEIGKATAKYFFYSNIMNFF
KTEITEANGEIRKRPEIETNGETGEIVWDKGRDFATVRKVESMPQVNIVKKTEVQTGGFSKES
IEPKRNSDKEIARKKDWDPKKYGGFDSPTVAYSVEWAKVEKGKSKKEKSVKEEEGITIMERSS
FEKNPIDFEEAKGYKEVKKDEIIKEPKYSEFEEENGRKRMEASAGEEQKGNEEAEPSKYVNFE
YEASHYEKEKGSPEDNEQKQEFVEQHKHYEDEIIEQISEFSKRVIEADANEDKVESAYNKHRD
KPIREQAENIIHEFTETNEGAPAAFKYFDTTIDRKRYTSTKEVEDATEIHQSITGEYETRIDL
SQLGGDSGGSGGSGGSTNLSDIIEKETGKQLVIQESILMLPEEVEEVIGNKPESDILVHTAYD
ESTDENVMLLTSDAPEYKPWALVIQDSNGENKIKMLSGGSGGSGGSTNLSDIIEKETGKQLVI
QESILMLPEEVEEVIGNKPESDILVHTAYDESTDENVMLLTSDAPEYKPWALVIQDSNGENKI
KMLSGGSKRTADGSEFEPKKKRKV
APOBEC3A(A3A)-BE4
(SEQ ID NO: 357)
MKRTADGSEFESPKKKRKVSEASPASGPRHLMDPHIFTSNFNNGIGRHKTYLCYEVERLDNGT
SVKMDQHRGFLHNQAKNLLCGFYGRHAELRFLDLVPSLQLDPAQIYRVTWFISWSPCFSWGCA
GEVRAFLQENTHVRLRIFAARIYDYDPLYKEALQMLRDAGAQVSIMTYDEFKHCWDTFVDHQG
CPFQPWDGLDEHSQALSGRLRAILQNQGNSGGSSGGSSGSEAPGASESAAPESSGGSSGGSDK
KYSIGLAIGTNSVGWAVITDEYKVPSKKFKVLGNTDRHSIKKNLIGALLFDSGETAEATRLKR
TARRRYTRRKNRICYLQEIFSNEMAKVDDSFFHRLEESFLVEEDKKHERHPIFGNIVDEVAYH
EKYPTIYHLRKKLVDSTDKADLRLIYLALAHMIKFRGHFLIEGDLNPDNSDVDKLFIQLVQTY
NQLFEENPINASGVDAKAILSARLSKSRRLENLIAQLPGEKKNGLFGNLIALSLGLTPNFKSN
FDLAEDAKLQLSKDTYDDDLDNLLAQIGDQYADLFLAAKNLSDAILLSDILRVNTEITKAPLS
ASMIKRYDEHHQDLTLLKALVRQQLPEKYKEIFFDQSKNGYAGYIDGGASQEEFYKFIKPILE
KMDGTEELLVKLNREDLLRKQRTFDNGSIPHQIHLGELHAILRRQEDFYPFLKDNREKIEKIL
TFRIPYYVGPLARGNSRFAWMTRKSEETITPWNFEEVVDKGASAQSFIERMTNFDKNLPNEKV
LPKHSLLYEYFTVYNELTKVKYVTEGMRKPAFLSGEQKKAIVDLLFKTNRKVTVKQLKEDYFK
KIECFDSVEISGVEDRFNASLGTYHDLLKIIKDKDFLDNEENEDILEDIVLTLTLFEDREMIE
ERLKTYAHLFDDKVMKQLKRRRYTGWGRLSRKLINGIRDKQSGKTILDFLKSDGFANRNFMQL
IHDDSLTFKEDIQKAQVSGQGDSLHEHIANLAGSPAIKKGILQTVKVVDELVKVMGRHKPENI
VIEMARENQTTQKGQKNSRERMKRIEEGIKELGSQILKEHPVENTQLQNEKLYLYYLQNGRDM
YVDQELDINRLSDYDVDHIVPQSFLKDDSIDNKVLTRSDKNRGKSDNVPSEEWKKMKNYWRQL
LNAKLITQRKFDNLTKAERGGLSELDKAGFIKRQLVETRQITKHVAQILDSRMNTKYDENDKL
IREVKVITLKSKLVSDFRKDFQFYKVREINNYHHAHDAYLNAVVGTALIKKYPKLESEFVYGD
YKVYDVRKMIAKSEQEIGKATAKYFFYSNIMNFFKTEITLANGEIRKRPLIETNGETGEIVWD
KGRDFATVRKVLSMPQVNIVKKTEVQTGGFSKESILPKRNSDKLIARKKDWDPKKYGGFDSPT
VAYSVLWAKVEKGKSKKLKSVKELLGITIMERSSFEKNPIDFLEAKGYKEVKKDLIIKLPKYS
LFELENGRKRMLASAGELQKGNELALPSKYVNFLYLASHYEKLKGSPEDNEQKQLFVEQHKHY
LDEIIEQISEFSKRVILADANLDKVLSAYNKHRDKPIREQAENIIHLFTLTNLGAPAAFKYFD
TTIDRKRYTSTKEVLDATLIHQSITGLYETRIDLSQLGGDSGGSGGSGGSTNLSDIIEKETGK
QLVIQESILMLPEEVEEVIGNKPESDILVHTAYDESTDENVMLLTSDAPEYKPWALVIQDSNG
ENKIKMLSGGSGGSGGSTNLSDIIEKETGKQLVIQESILMLPEEVEEVIGNKPESDILVHTAY
DESTDENVMLLTSDAPEYKPWALVIQDSNGENKIKMLSGGSKRTADGSEFEPKKKRKV
APOBEC3B(A3B)-BE4
(SEQ ID NO: 358)
MKRTADGSEFESPKKKRKVNPQIRNPMERMYRDTFYDNFENEPILYGRSYTWLCYEVKIKRGR
SNLLWDTGVFRGQVYFKPQYHAEMCFLSWFCGNQLPAYKCFQITWFVSWTPCPDCVAKLAEFL
SEHPNVTLTISAARLYYYWERDYRRALCRLSQAGARVTIMDYEEFAYCWENFVYNEGQQFMPW
YKFDENYAFLHRTLKEILRYLMDPDTFTFNFNNDPLVLRRRQTYLCYEVERLDNGTWVLMDQH
MGFLCNEAKNLLCGFYGRHAELRFLDLVPSLQLDPAQIYRVTWFISWSPCFSWGCAGEVRAFL
QENTHVRLRIFAARIYDYDPLYKEALQMLRDAGAQVSIMTYDEFEYCWDTFVYRQGCPFQPWD
GLEEHSQALSGRLRAILQNQGNSGGSSGGSSGSETPGTSESATPESSGGSSGGSDKKYSIGLA
IGTNSVGWAVITDEYKVPSKKFKVEGNTDRHSIKKNEIGAEEFDSGETAEATREKRTARRRYT
RRKNRICYEQEIFSNEMAKVDDSFFHREEESFEVEEDKKHERHPIFGNIVDEVAYHEKYPTIY
HERKKEVDSTDKADEREIYEAEAHMIKFRGHFEIEGDENPDNSDVDKEFIQEVQTYNQEFEEN
PINASGVDAKAIESARESKSRREENEIAQEPGEKKNGEFGNEIAESEGETPNFKSNFDEAEDA
KEQESKDTYDDDEDNEEAQIGDQYADEFEAAKNESDAIEESDIERVNTEITKAPESASMIKRY
DEHHQDETEEKAEVRQQEPEKYKEIFFDQSKNGYAGYIDGGASQEEFYKFIKPIEEKMDGTEE
EEVKENREDEERKQRTFDNGSIPHQIHEGEEHAIERRQEDFYPFEKDNREKIEKIETFRIPYY
VGPEARGNSRFAWMTRKSEETITPWNFEEWDKGASAQSFIERMTNFDKNEPNEKVEPKHSEEY
EYFTVYNEETKVKYVTEGMRKPAFESGEQKKAIVDEEFKTNRKVTVKQEKEDYFKKIECFDSV
EISGVEDRFNASEGTYHDEEKIIKDKDFEDNEENEDIEEDIVETETEFEDREMIEEREKTYAH
EFDDKVMKQEKRRRYTGWGRESRKEINGIRDKQSGKTIEDFEKSDGFANRNFMQEIHDDSETF
KEDIQKAQVSGQGDSEHEHIANEAGSPAIKKGIEQTVKVVDEEVKVMGRHKPENIVIEMAREN
QTTQKGQKNSRERMKRIEEGIKEEGSQIEKEHPVENTQEQNEKEYEYYEQNGRDMYVDQEEDI
NRESDYDVDHIVPQSFEKDDSIDNKVETRSDKNRGKSDNVPSEEVVKKMKNYWRQEENAKEIT
QRKFDNETKAERGGESEEDKAGFIKRQEVETRQITKHVAQIEDSRMNTKYDENDKEIREVKVI
TEKSKEVSDFRKDFQFYKVREINNYHHAHDAYENAWGTALIKKYPKLESEFVYGDYKVYDVRK
MIAKSEQEIGKATAKYFFYSNIMNFFKTEITLANGEIRKRPLIETNGETGEIVWDKGRDFATV
RKVLSMPQVNIVKKTEVQTGGFSKESILPKRNSDKLIARKKDWDPKKYGGFDSPTVAYSVLWA
KVEKGKSKKLKSVKELLGITIMERSSFEKNPIDFLEAKGYKEVKKDLIIKLPKYSLFELENGR
KRMLASAGELQKGNELALPSKYVNFLYLASHYEKLKGSPEDNEQKQLFVEQHKHYLDEIIEQI
SEFSKRVILADANLDKVLSAYNKHRDKPIREQAENIIHLFTLTNLGAPAAFKYFDTTIDRKRY
TSTKEVLDATLIHQSITGLYETRIDLSQLGGDSGGSGGSGGSTNLSDIIEKETGKQLVIQESI
LMLPEEVEEVIGNKPESDILVHTAYDESTDENVMLLTSDAPEYKPWALVIQDSNGENKIKMLS
GGSGGSGGSTNLSDIIEKETGKQLVIQESILMLPEEVEEVIGNKPESDILVHTAYDESTDENV
MLLTSDAPEYKPWALVIQDSNGENKIKMLSGGSKRTADGSEFEPKKKRKV
APOBEC3G(A3G)-BE4
(SEQ ID NO: 359)
MKRTADGSEFESPKKKRKVKPHFRNTVERMYRDTFSYNFYNRPILSRRNTVWLCYEVKTKGPS
RPPLDAKIFRGQVYSELKYHPEMRFFHWFSKWRKLHRDQEYEVTWYISWSPCTKCTRDMATFL
AEDPKVTLTIFVARLYYFWDPDYQEALRSLCQKRDGPRATMKIMNYDEFQHCWSKFVYSQREL
FEPWNNLPKYYILLHIMLGEILRHSMDPPTFTFNFNNEPWVRGRHETYLCYEVERMHNDTWVL
LNQRRGFLCNQAPHKHGFLEGRHAELCFLDVIPFWKLDLDQDYRVTCFTSWSPCFSCAQEMAK
FISKNKHVSLCIFTARIYDDQGRCQEGLRTLAEAGAKISIMTYSEFKHCWDTFVDHQGCPFQP
WDGLDEHSQDLSGRLRAILQNQENSGGSSGGSSGSETPGTSESATPESSGGSSGGSDKKYSIG
LAIGTNSVGWAVITDEYKVPSKKFKVEGNTDRHSIKKNEIGAEEFDSGETAEATREKRTARRR
YTRRKNRICYEQEIFSNEMAKVDDSFFHREEESFEVEEDKKHERHPIFGNIVDEVAYHEKYPT
IYHERKKEVDSTDKADEREIYEAEAHMIKFRGHFEIEGDENPDNSDVDKEFIQEVQTYNQEFE
ENPINASGVDAKAIESARESKSRREENEIAQEPGEKKNGEFGNEIAESEGETPNFKSNFDEAE
DAKEQESKDTYDDDEDNEEAQIGDQYADEFEAAKNESDAIEESDIERVNTEITKAPESASMIK
RYDEHHQDETEEKAEVRQQEPEKYKEIFFDQSKNGYAGYIDGGASQEEFYKFIKPIEEKMDGT
EEEEVKENREDEERKQRTFDNGSIPHQIHEGEEHAIERRQEDFYPFEKDNREKIEKIETFRIP
YYVGPEARGNSRFAWMTRKSEETITPWNFEEWDKGASAQSFIERMTNFDKNEPNEKVEPKHSE
EYEYFTVYNEETKVKYVTEGMRKPAFESGEQKKAIVDEEFKTNRKVTVKQEKEDYFKKIECFD
SVEISGVEDRFNASEGTYHDEEKIIKDKDFEDNEENEDIEEDIVETETEFEDREMIEEREKTY
AHEFDDKVMKQEKRRRYTGWGRESRKEINGIRDKQSGKTIEDFEKSDGFANRNFMQEIHDDSE
TFKEDIQKAQVSGQGDSEHEHIANEAGSPAIKKGIEQTVKWDEEVKVMGRHKPENIVIEMARE
NQTTQKGQKNSRERMKRIEEGIKEEGSQIEKEHPVENTQEQNEKEYEYYEQNGRDMYVDQEED
INRESDYDVDHIVPQSFEKDDSIDNKVETRSDKNRGKSDNVPSEEVVKKMKNYWRQEENAKEI
TQRKFDNETKAERGGESEEDKAGFIKRQEVETRQITKHVAQIEDSRMNTKYDENDKEIREVKV
ITEKSKEVSDFRKDFQFYKVREINNYHHAHDAYENAWGTALIKKYPKLESEFVYGDYKVYDVR
KMIAKSEQEIGKATAKYFFYSNIMNFFKTEITLANGEIRKRPLIETNGETGEIVWDKGRDFAT
VRKVLSMPQVNIVKKTEVQTGGFSKESILPKRNSDKLIARKKDWDPKKYGGFDSPTVAYSVLV
VAKVEKGKSKKLKSVKELLGITIMERSSFEKNPIDFLEAKGYKEVKKDLIIKLPKYSLFELEN
GRKRMLASAGELQKGNELALPSKYVNFLYLASHYEKLKGSPEDNEQKQLFVEQHKHYLDEIIE
QISEFSKRVILADANLDKVLSAYNKHRDKPIREQAENIIHLFTLTNLGAPAAFKYFDTTIDRK
RYTSTKEVLDATLIHQSITGLYETRIDLSQLGGDSGGSGGSGGSTNLSDIIEKETGKQLVIQE
SILMLPEEVEEVIGNKPESDILVHTAYDESTDENVMLLTSDAPEYKPWALVIQDSNGENKIKM
LSGGSGGSGGSTNLSDIIEKETGKQLVIQESILMLPEEVEEVIGNKPESDILVHTAYDESTDE
NVMLLTSDAPEYKPWALVIQDSNGENKIKMLSGGSKRTADGSEFEPKKKRKV
AID-BE4
(SEQ ID NO: 360)
MKRTADGSEFESPKKKRKVDSLLMNRRKFLYQFKNVRWAKGRRETYLCYVVKRRDSATSFSLD
FGYLRNKNGCHVELLFLRYISDWDLDPGRCYRVTWFTSWSPCYDCARHVADFLRGNPNLSLRI
FTARLYFCEDRKAEPEGLRRLHRAGVQIAIMTFKDYFYCWNTFVENHERTFKAWEGLHENSVR
LSRQLRRILLPLYEVDDLRDAFRTLGLSGGSSGGSSGSETPGTSESATPESSGGSSGGSDKKY
SIGLAIGTNSVGWAVITDEYKVPSKKFKVLGNTDRHSIKKNLIGALLFDSGETAEATRLKRTA
RRRYTRRKNRICYLQEIFSNEMAKVDDSFFHRLEESFLVEEDKKHERHPIFGNIVDEVAYHEK
YPTIYHLRKKLVDSTDKADLRLIYLALAHMIKFRGHFLIEGDLNPDNSDVDKLFIQLVQTYNQ
LFEENPINASGVDAKAILSARLSKSRRLENLIAQLPGEKKNGLFGNLIALSLGLTPNFKSNFD
LAEDAKLQLSKDTYDDDLDNLLAQIGDQYADLFLAAKNLSDAILLSDILRVNTEITKAPLSAS
MIKRYDEHHQDLTLLKALVRQQLPEKYKEIFFDQSKNGYAGYIDGGASQEEFYKFIKPILEKM
DGTEELLVKLNREDLLRKQRTFDNGSIPHQIHLGELHAILRRQEDFYPFLKDNREKIEKILTF
RIPYYVGPLARGNSRFAWMTRKSEETITPWNFEEVVDKGASAQSFIERMTNFDKNLPNEKVLP
KHSLLYEYFTVYNELTKVKYVTEGMRKPAFLSGEQKKAIVDLLFKTNRKVTVKQLKEDYFKKI
ECFDSVEISGVEDRFNASLGTYHDLLKIIKDKDFLDNEENEDILEDIVLTLTLFEDREMIEER
LKTYAHLFDDKVMKQLKRRRYTGWGRLSRKLINGIRDKQSGKTILDFLKSDGFANRNFMQLIH
DDSLTFKEDIQKAQVSGQGDSLHEHIANLAGSPAIKKGILQTVKVVDELVKVMGRHKPENIVI
EMARENQTTQKGQKNSRERMKRIEEGIKELGSQILKEHPVENTQLQNEKLYLYYLQNGRDMYV
DQELDINRLSDYDVDHIVPQSFLKDDSIDNKVLTRSDKNRGKSDNVPSEEWKKMKNYWRQLLN
AKLITQRKFDNLTKAERGGLSELDKAGFIKRQLVETRQITKHVAQILDSRMNTKYDENDKLIR
EVKVITLKSKLVSDFRKDFQFYKVREINNYHHAHDAYLNAVVGTALIKKYPKLESEFVYGDYK
VYDVRKMIAKSEQEIGKATAKYFFYSNIMNFFKTEITLANGEIRKRPLIETNGETGEIVWDKG
RDFATVRKVLSMPQVNIVKKTEVQTGGFSKESILPKRNSDKLIARKKDWDPKKYGGFDSPTVA
YSVLWAKVEKGKSKKLKSVKELLGITIMERSSFEKNPIDFLEAKGYKEVKKDLIIKLPKYSLF
ELENGRKRMLASAGELQKGNELALPSKYVNFLYLASHYEKLKGSPEDNEQKQLFVEQHKHYLD
EIIEQISEFSKRVILADANLDKVLSAYNKHRDKPIREQAENIIHLFTLTNLGAPAAFKYFDTT
IDRKRYTSTKEVEDATEIHQSITGEYETRIDESQLGGDSGGSGGSGGSTNLSDIIEKETGKQL
VIQESILMLPEEVEEVIGNKPESDILVHTAYDESTDENVMLLTSDAPEYKPWALVIQDSNGEN
KIKMLSGGSGGSGGSTNLSDIIEKETGKQLVIQESILMLPEEVEEVIGNKPESDILVHTAYDE
STDENVMLLTSDAPEYKPWALVIQDSNGENKIKMLSGGSKRTADGSEFEPKKKRKV
CDA-BE4
(SEQ ID NO: 361)
MKRTADGSEFESPKKKRKVTDAEYVRIHEKLDIYTFKKQFFNNKKSVSHRCYVLFELKRRGER
RACFWGYAVNKPQSGTERGIHAEIFSIRKVEEYLRDNPGQFTINWYSSWSPCADCAEKILEWY
NQELRGNGHTLKIWACKLYYEKNARNQIGLWNLRDNGVGLNVMVSEHYQCCRKIFIQSSHNQL
NENRWLEKTLKRAEKRRSELSIMIQVKILHTTKSPAVSGGSSGGSSGSEAPGASESAAPESSG
GSSGGSDKKYSIGLAIGTNSVGWAVITDEYKVPSKKFKVEGNTDRHSIKKNEIGAEEFDSGET
AEATREKRTARRRYTRRKNRICYEQEIFSNEMAKVDDSFFHREEESFEVEEDKKHERHPIFGN
IVDEVAYHEKYPTIYHERKKEVDSTDKADERElYEAEAHMIKFRGHFEIEGDENPDNSDVDKE
FIQEVQTYNQEFEENPINASGVDAKAIESARESKSRREENEIAQEPGEKKNGEFGNEIAESEG
ETPNFKSNFDEAEDAKEQESKDTYDDDEDNEEAQIGDQYADEFEAAKNESDAIEESDIERVNT
EITKAPESASMIKRYDEHHQDETEEKAEVRQQEPEKYKEIFFDQSKNGYAGYIDGGASQEEFY
KFIKPIEEKMDGTEEEEVKENREDEERKQRTFDNGSIPHQIHEGEEHAIERRQEDFYPFEKDN
REKIEKIETFRIPYYVGPEARGNSRFAWMTRKSEETITPWNFEEVVDKGASAQSFIERMTNFD
KNEPNEKVEPKHSEEYEYFTVYNEETKVKYVTEGMRKPAFESGEQKKAIVDEEFKTNRKVTVK
QEKEDYFKKIECFDSVEISGVEDRFNASEGTYHDEEKIIKDKDFEDNEENEDIEEDIVETETE
FEDREMIEEREKTYAHEFDDKVMKQEKRRRYTGWGRESRKEINGIRDKQSGKTIEDFEKSDGF
ANRNFMQEIHDDSETFKEDIQKAQVSGQGDSEHEHIANEAGSPAIKKGIEQTVKVVDEEVKVM
GRHKPENIVIEMARENQTTQKGQKNSRERMKRIEEGIKEEGSQIEKEHPVENTQEQNEKEYEY
YEQNGRDMYVDQEEDINRESDYDVDHIVPQSFEKDDSIDNKVETRSDKNRGKSDNVPSEEVVK
KMKNYWRQEENAKEITQRKFDNETKAERGGESEEDKAGFIKRQEVETRQITKHVAQIEDSRMN
TKYDENDKEIREVKVITEKSKEVSDFRKDFQFYKVREINNYHHAHDAYENAWGTAEIKKYPKE
ESEFVYGDYKVYDVRKMIAKSEQEIGKATAKYFFYSNIMNFFKTEITEANGEIRKRPEIETNG
ETGEIVWDKGRDFATVRKVESMPQVNIVKKTEVQTGGFSKESIEPKRNSDKEIARKKDWDPKK
YGGFDSPTVAYSVEVVAKVEKGKSKKEKSVKEEEGITIMERSSFEKNPIDFEEAKGYKEVKKD
EIIKEPKYSEFEEENGRKRMEASAGEEQKGNEEAEPSKYVNFEYEASHYEKEKGSPEDNEQKQ
EFVEQHKHYEDEIIEQISEFSKRVIEADANEDKVESAYNKHRDKPIREQAENIIHEFTETNEG
APAAFKYFDTTIDRKRYTSTKEVEDATEIHQSITGEYETRIDESQEGGDSGGSGGSGGSTNLS
DIIEKETGKQLVIQESILMLPEEVEEVIGNKPESDILVHTAYDESTDENVMLLTSDAPEYKPW
ALVIQDSNGENKIKMLSGGSGGSGGSTNLSDIIEKETGKQLVIQESILMLPEEVEEVIGNKPE
SDILVHTAYDESTDENVMLLTSDAPEYKPWALVIQDSNGENKIKMLSGGSKRTADGSEFEPKK
KRKV
FERNY-BE4
(SEQ ID NO: 362)
MKRTADGSEFESPKKKRKVFERNYDPRELRKETYLLYEIKWGKSGKLWRHWCQNNRTQHAEVY
FLENIFNARRFNPSTHCSITWYLSWSPCAECSQKIVDFLKEHPNVNLEIYVARLYYHEDERNR
QGLRDLVNSGVTIRIMDLPDYNYCWKTFVSDQGGDEDYWPGHFAPWIKQYSLKLSGGSSGGSS
GSETPGTSESATPESSGGSSGGSDKKYSIGLAIGTNSVGWAVITDEYKVPSKKFKVEGNTDRH
SIKKNEIGAEEFDSGETAEATRLKRTARRRYTRRKNRICYEQEIFSNEMAKVDDSFFHREEES
FEVEEDKKHERHPIFGNIVDEVAYHEKYPTIYHERKKEVDSTDKADEREIYEAEAHMIKFRGH
FEIEGDENPDNSDVDKEFIQEVQTYNQEFEENPINASGVDAKAIESARESKSRREENEIAQEP
GEKKNGEFGNEIAESEGETPNFKSNFDEAEDAKEQESKDTYDDDEDNEEAQIGDQYADEFEAA
KNESDAIEESDIERVNTEITKAPESASMIKRYDEHHQDETEEKAEVRQQEPEKYKEIFFDQSK
NGYAGYIDGGASQEEFYKFIKPIEEKMDGTEEEEVKENREDEERKQRTFDNGSIPHQIHEGEE
HAIERRQEDFYPFEKDNREKIEKIETFRIPYYVGPEARGNSRFAWMTRKSEETITPWNFEEVV
DKGASAQSFIERMTNFDKNEPNEKVEPKHSEEYEYFTVYNEETKVKYVTEGMRKPAFESGEQK
KAIVDEEFKTNRKVTVKQEKEDYFKKIECFDSVEISGVEDRFNASEGTYHDEEKIIKDKDFED
NEENEDIEEDIVETETEFEDREMIEEREKTYAHEFDDKVMKQEKRRRYTGWGRESRKEINGIR
DKQSGKTIEDFEKSDGFANRNFMQEIHDDSETFKEDIQKAQVSGQGDSEHEHIANEAGSPAIK
KGIEQTVKWDEEVKVMGRHKPENIVIEMARENQTTQKGQKNSRERMKRIEEGIKEEGSQIEKE
HPVENTQEQNEKEYEYYEQNGRDMYVDQEEDINRESDYDVDHIVPQSFEKDDSIDNKVETRSD
KNRGKSDNVPSEEWKKMKNYWRQEENAKEITQRKFDNETKAERGGESEEDKAGFIKRQEVETR
QITKHVAQIEDSRMNTKYDENDKEIREVKVITEKSKEVSDFRKDFQFYKVREINNYHHAHDAY
ENAVVGTAEIKKYPKEESEFVYGDYKVYDVRKMIAKSEQEIGKATAKYFFYSNIMNFFKTEIT
EANGEIRKRPEIETNGETGEIVWDKGRDFATVRKVESMPQVNIVKKTEVQTGGFSKESIEPKR
NSDKEIARKKDWDPKKYGGFDSPTVAYSVEWAKVEKGKSKKEKSVKEEEGITIMERSSFEKNP
IDFEEAKGYKEVKKDEIIKEPKYSEFEEENGRKRMEASAGEEQKGNEEAEPSKYVNFEYEASH
YEKEKGSPEDNEQKQEFVEQHKHYEDEIIEQISEFSKRVIEADANEDKVESAYNKHRDKPIRE
QAENIIHEFTETNEGAPAAFKYFDTTIDRKRYTSTKEVEDATEIHQSITGEYETRIDESQLGG
DSGGSGGSGGSTNLSDIIEKETGKQLVIQESILMLPEEVEEVIGNKPESDILVHTAYDESTDE
NVMLLTSDAPEYKPWALVIQDSNGENKIKMLSGGSGGSGGSTNLSDIIEKETGKQLVIQESIL
MLPEEVEEVIGNKPESDILVHTAYDESTDENVMLLTSDAPEYKPWALVIQDSNGENKIKMLSG
GSKRTADGSEFEPKKKRKV
Evolved APOBEC3A (eA3A)-BE4
(SEQ ID NO: 363)
MKRTADGSEFESPKKKRKVEASPASGPRHLMDPHIFTSNFNNGIGRHKTYLCYEVERLDNGTS
VKMDQHRGFLHGQAKNLLCGFYGRHAELRFLDLVPSLQLDPAQIYRVTWFISWSPCFSWGCAG
EVRAFLQENTHVRLRIFAARIYDYDPLYKEALQMLRDAGAQVSIMTYDEFKHCWDTFVDHQGC
PFQPWDGLDEHSQALSGRLRAILQNQGNSGGSSGGSSGSETPGTSESATPESSGGSSGGSDKK
YSIGLAIGTNSVGWAVITDEYKVPSKKFKVLGNTDRHSIKKNLIGALLFDSGETAEATRLKRT
ARRRYTRRKNRICYLQEIFSNEMAKVDDSFFHRLEESFLVEEDKKHERHPIFGNIVDEVAYHE
KYPTIYHLRKKLVDSTDKADLRLIYLALAHMIKFRGHFLIEGDLNPDNSDVDKLFIQLVQTYN
QLFEENPINASGVDAKAILSARLSKSRRLENLIAQLPGEKKNGLFGNLIALSLGLTPNFKSNF
DLAEDAKLQLSKDTYDDDLDNLLAQIGDQYADLFLAAKNLSDAILLSDILRVNTEITKAPLSA
SMIKRYDEHHQDLTLLKALVRQQLPEKYKEIFFDQSKNGYAGYIDGGASQEEFYKFIKPILEK
MDGTEELLVKLNREDLLRKQRTFDNGSIPHQIHLGELHAILRRQEDFYPFLKDNREKIEKILT
FRIPYYVGPLARGNSRFAWMTRKSEETITPWNFEEVVDKGASAQSFIERMTNFDKNLPNEKVL
PKHSLLYEYFTVYNELTKVKYVTEGMRKPAFLSGEQKKAIVDLLFKTNRKVTVKQLKEDYFKK
IECFDSVEISGVEDRFNASLGTYHDLLKIIKDKDFLDNEENEDILEDIVLTLTLFEDREMIEE
RLKTYAHLFDDKVMKQLKRRRYTGWGRLSRKLINGIRDKQSGKTILDFLKSDGFANRNFMQLI
HDDSLTFKEDIQKAQVSGQGDSLHEHIANLAGSPAIKKGILQTVKVVDELVKVMGRHKPENIV
IEMARENQTTQKGQKNSRERMKRIEEGIKELGSQILKEHPVENTQLQNEKLYLYYLQNGRDMY
VDQELDINRLSDYDVDHIVPQSFLKDDSIDNKVLTRSDKNRGKSDNVPSEEWKKMKNYWRQLL
NAKLITQRKFDNLTKAERGGLSELDKAGFIKRQLVETRQITKHVAQILDSRMNTKYDENDKLI
REVKVITLKSKLVSDFRKDFQFYKVREINNYHHAHDAYLNAVVGTALIKKYPKLESEFVYGDY
KVYDVRKMIAKSEQEIGKATAKYFFYSNIMNFFKTEITLANGEIRKRPLIETNGETGEIVWDK
GRDFATVRKVLSMPQVNIVKKTEVQTGGFSKESILPKRNSDKLIARKKDWDPKKYGGFDSPTV
AYSVLWAKVEKGKSKKLKSVKELLGITIMERSSFEKNPIDFLEAKGYKEVKKDLIIKLPKYSL
FELENGRKRMLASAGELQKGNELALPSKYVNFLYLASHYEKLKGSPEDNEQKQLFVEQHKHYL
DEIIEQISEFSKRVILADANLDKVLSAYNKHRDKPIREQAENIIHLFTLTNLGAPAAFKYFDT
TIDRKRYTSTKEVEDATEIHQSITGEYETRIDESQEGGDSGGSGGSGGSTNLSDIIEKETGKQ
LVIQESILMLPEEVEEVIGNKPESDILVHTAYDESTDENVMLLTSDAPEYKPWALVIQDSNGE
NKIKMLSGGSGGSGGSTNLSDIIEKETGKQLVIQESILMLPEEVEEVIGNKPESDILVHTAYD
ESTDENVMLLTSDAPEYKPWALVIQDSNGENKIKMLSGGSKRTADGSEFEPKKKRKV
AALN-BE4
(SEQ ID NO: 364)
MKRTADGSEFESPKKKRKVSSETGPVAVDPTLRRRIEPHEFEVFFDPRELAAETCLLYEINWG
GRHSIWRHTSQNTNKHVEVNFIEKFTTERYFCPNTRCSITWFLSWSPCGECSRAITEFLSRYP
HVTLFIYIARLYHLANPRNRQGLRDLISSGVTIQIMTEQESGYCWRNFVNYSPSNEAHWPRYP
HLWVRLYVLELYCIILGLPPCLNILRRKQPQLTFFTIALQSCHYQRLPPHILWATGLKSGGSS
GGSSGSETPGTSESATPESSGGSSGGSDKKYSIGLAIGTNSVGWAVITDEYKVPSKKFKVLGN
TDRHSIKKNLIGALLFDSGETAEATRLKRTARRRYTRRKNRICYEQEIFSNEMAKVDDSFFHR
EEESFEVEEDKKHERHPIFGNIVDEVAYHEKYPTIYHERKKEVDSTDKADEREIYEAEAHMIK
FRGHFEIEGDENPDNSDVDKEFIQEVQTYNQEFEENPINASGVDAKAILSARLSKSRRLENLI
AQLPGEKKNGLFGNLIALSLGLTPNFKSNFDLAEDAKLQLSKDTYDDDLDNLLAQIGDQYADL
FLAAKNLSDAILLSDILRVNTEITKAPLSASMIKRYDEHHQDLTLLKALVRQQLPEKYKEIFF
DQSKNGYAGYIDGGASQEEFYKFIKPILEKMDGTEEEEVKENREDEERKQRTFDNGSIPHQIH
EGEEHAIERRQEDFYPFEKDNREKIEKIETFRIPYYVGPLARGNSRFAWMTRKSEETITPWNF
EEVVDKGASAQSFIERMTNFDKNLPNEKVLPKHSLLYEYFTVYNELTKVKYVTEGMRKPAFLS
GEQKKAIVDLLFKTNRKVTVKQLKEDYFKKIECFDSVEISGVEDRFNASEGTYHDEEKIIKDK
DFEDNEENEDIEEDIVETETEFEDREMIEEREKTYAHEFDDKVMKQEKRRRYTGWGRESRKEI
NGIRDKQSGKTIEDFEKSDGFANRNFMQLIHDDSLTFKEDIQKAQVSGQGDSLHEHIANLAGS
PAIKKGILQTVKVVDELVKVMGRHKPENIVIEMARENQTTQKGQKNSRERMKRIEEGIKELGS
QILKEHPVENTQLQNEKLYLYYLQNGRDMYVDQELDINRLSDYDVDHIVPQSFLKDDSIDNKV
LTRSDKNRGKSDNVPSEEWKKMKNYWRQLLNAKLITQRKFDNLTKAERGGLSELDKAGFIKRQ
LVETRQITKHVAQILDSRMNTKYDENDKLIREVKVITLKSKLVSDFRKDFQFYKVREINNYHH
AHDAYLNAWGTALIKKYPKLESEFVYGDYKVYDVRKMIAKSEQEIGKATAKYFFYSNIMNFFK
TEITLANGEIRKRPEIETNGETGEIVWDKGRDFATVRKVESMPQVNIVKKTEVQTGGFSKESI
EPKRNSDKEIARKKDWDPKKYGGFDSPTVAYSVEWAKVEKGKSKKEKSVKEEEGITIMERSSF
EKNPIDFEEAKGYKEVKKDEIIKEPKYSEFEEENGRKRMEASAGEEQKGNEEAEPSKYVNFEY
EASHYEKEKGSPEDNEQKQEFVEQHKHYEDEIIEQISEFSKRVIEADANEDKVESAYNKHRDK
PIREQAENIIHLFTLTNLGAPAAFKYFDTTIDRKRYTSTKEVLDATLIHQSITGLYETRIDLS
QLGGDSGGSGGSGGSTNLSDIIEKETGKQLVIQESILMLPEEVEEVIGNKPESDILVHTAYDE
STDENVMLLTSDAPEYKPWALVIQDSNGENKIKMLSGGSGGSGGSTNLSDIIEKETGKQLVIQ
ESILMLPEEVEEVIGNKPESDILVHTAYDESTDENVMLLTSDAPEYKPWALVIQDSNGENKIK
MLSGGSKRTADGSEFEPKKKRKV
BE4max, modified with SpCas9-NG (“BE4-NG”)
(SEQ ID NO: 365)
MKRTADGSEFESPKKKRKVSSETGPVAVDPTLRRRIEPHEFEVFFDPRELRKETCLLYEINWG
GRHSIWRHTSQNTNKHVEVNFIEKFTTERYFCPNTRCSITWFLSWSPCGECSRAITEFLSRYP
HVTLFIYIARLYHHADPRNRQGLRDLISSGVTIQIMTEQESGYCWRNFVNYSPSNEAHWPRYP
HLWVRLYVLELYCIILGLPPCLNILRRKQPQLTFFTIALQSCHYQRLPPHILWATGLKSGGSS
GGSSGSETPGTSESATPESSGGSSGGSDKKYSIGLAIGTNSVGWAVITDEYKVPSKKFKVLGN
TDRHSIKKNLIGALLFDSGETAEATRLKRTARRRYTRRKNRICYLQEIFSNEMAKVDDSFFHR
LEESFLVEEDKKHERHPIFGNIVDEVAYHEKYPTIYHLRKKEVDSTDKADEREIYEAEAHMIK
FRGHFEIEGDENPDNSDVDKEFIQEVQTYNQEFEENPINASGVDAKAIESARESKSRREENEI
AQEPGEKKNGEFGNEIAESEGETPNFKSNFDEAEDAKEQESKDTYDDDEDNEEAQIGDQYADE
FEAAKNESDAIEESDIERVNTEITKAPESASMIKRYDEHHQDETEEKAEVRQQEPEKYKEIFF
DQSKNGYAGYIDGGASQEEFYKFIKPIEEKMDGTEEEEVKENREDEERKQRTFDNGSIPHQIH
EGEEHAIERRQEDFYPFEKDNREKIEKIETFRIPYYVGPEARGNSRFAWMTRKSEETITPWNF
EEVVDKGASAQSFIERMTNFDKNEPNEKVEPKHSEEYEYFTVYNEETKVKYVTEGMRKPAFES
GEQKKAIVDEEFKTNRKVTVKQEKEDYFKKIECFDSVEISGVEDRFNASEGTYHDEEKIIKDK
DFEDNEENEDIEEDIVETETEFEDREMIEEREKTYAHEFDDKVMKQEKRRRYTGWGRESRKEI
NGIRDKQSGKTIEDFEKSDGFANRNFMQEIHDDSETFKEDIQKAQVSGQGDSEHEHIANEAGS
PAIKKGIEQTVKVVDEEVKVMGRHKPENIVIEMARENQTTQKGQKNSRERMKRIEEGIKEEGS
QIEKEHPVENTQEQNEKEYEYYEQNGRDMYVDQEEDINRESDYDVDHIVPQSFEKDDSIDNKV
ETRSDKNRGKSDNVPSEEWKKMKNYWRQEENAKEITQRKFDNETKAERGGESEEDKAGFIKRQ
EVETRQITKHVAQILDSRMNTKYDENDKLIREVKVITLKSKLVSDFRKDFQFYKVREINNYHH
AHDAYLNAVVGTAEIKKYPKEESEFVYGDYKVYDVRKMIAKSEQEIGKATAKYFFYSNIMNFF
KTEITEANGEIRKRPEIETNGETGEIVWDKGRDFATVRKVESMPQVNIVKKTEVQTGGFSKES
IRPKRNSDKEIARKKDWDPKKYGGFVSPTVAYSVEWAKVEKGKSKKEKSVKEEEGITIMERSS
FEKNPIDFEEAKGYKEVKKDEIIKEPKYSEFEEENGRKRMEASARFEQKGNEEAEPSKYVNFE
YEASHYEKEKGSPEDNEQKQEFVEQHKHYEDEIIEQISEFSKRVIEADANEDKVESAYNKHRD
KPIREQAENIIHEFTETNEGAPRAFKYFDTTIDRKVYRSTKEVEDATEIHQSITGEYETRIDL
SQLGGDSGGSGGSGGSTNLSDIIEKETGKQLVIQESILMLPEEVEEVIGNKPESDILVHTAYD
ESTDENVMLLTSDAPEYKPWALVIQDSNGENKIKMLSGGSGGSGGSTNLSDIIEKETGKQLVI
QESILMLPEEVEEVIGNKPESDILVHTAYDESTDENVMLLTSDAPEYKPWALVIQDSNGENKI
KMLSGGSKRTADGSEFEPKKKRKV
rAPOBEC1-XTEN-SpCas9 nickase-UGI-NLS
(BE3, SEQ ID NO: 366)
MSSETGPVAVDPTLRRRIEPHEFEVFFDPRELRKETCLLYEINWGGRHSIWRHTSQNTNKHVE
VNFIEKFTTERYFCPNTRCSITWFLSWSPCGECSRAITEFLSRYPHVTLFIYIARLYHHADPR
NRQGLRDLISSGVTIQIMTEQESGYCWRNFVNYSPSNEAHWPRYPHLWVRLYVLELYCllLGL
PPCLNILRRKQPQLTFFTIALQSCHYQRLPPHILWATGLKSGSETPGTSESATPESDKKYSIG
LAIGTNSVGWAVITDEYKVPSKKFKVLGNTDRHSIKKNLIGALLFDSGETAEATRLKRTARRR
YTRRKNRICYLQEIFSNEMAKVDDSFFHRLEESFLVEEDKKHERHPIFGNIVDEVAYHEKYPT
IYHLRKKLVDSTDKADLRLIYLALAHMIKFRGHFLIEGDLNPDNSDVDKLFIQLVQTYNQLFE
ENPINASGVDAKAILSARLSKSRRLENLIAQLPGEKKNGLFGNLIALSLGLTPNFKSNFDLAE
DAKLQLSKDTYDDDLDNLLAQIGDQYADLFLAAKNLSDAILLSDILRVNTEITKAPLSASMIK
RYDEHHQDLTLLKALVRQQLPEKYKEIFFDQSKNGYAGYIDGGASQEEFYKFIKPILEKMDGT
EELLVKLNREDLLRKQRTFDNGSIPHQIHLGELHAILRRQEDFYPFLKDNREKIEKILTFRIP
YYVGPLARGNSRFAWMTRKSEETITPWNFEEVVDKGASAQSFIERMTNFDKNLPNEKVLPKHS
LLYEYFTVYNELTKVKYVTEGMRKPAFLSGEQKKAIVDLLFKTNRKVTVKQLKEDYFKKIECF
DSVEISGVEDRFNASLGTYHDLLKllKDKDFLDNEENEDILEDIVLTlTLFEDREMIEERLKT
YAHLFDDKVMKQLKRRRYTGWGRLSRKLINGIRDKQSGKTILDFLKSDGFANRNFMQLIHDDS
LTFKEDIQKAQVSGQGDSLHEHIANLAGSPAIKKGILQTVKVVDELVKVMGRHKPENIVIEMA
RENQTTQKGQKNSRERMKRIEEGIKELGSQILKEHPVENTQLQNEKLYLYYLQNGRDMYVDQE
LDINRLSDYDVDHIVPQSFLKDDSIDNKVLTRSDKNRGKSDNVPSEEVVKKMKNYWRQLLNAK
LITQRKFDNLTKAERGGLSELDKAGFIKRQLVETRQITKHVAQILDSRMNTKYDENDKLIREV
KVITLKSKLVSDFRKDFQFYKVREINNYHHAHDAYLNAVVGTALIKKYPKLESEFVYGDYKVY
DVRKMIAKSEQEIGKATAKYFFYSNIMNFFKTEITLANGEIRKRPLIETNGETGEIVWDKGRD
FATVRKVLSMPQVNIVKKTEVQTGGFSKESILPKRNSDKLIARKKDWDPKKYGGFDSPTVAYS
VLVVAKVEKGKSKKLKSVKELLGITIMERSSFEKNPIDFLEAKGYKEVKKDLllKLPKYSLFE
LENGRKRMLASAGELQKGNELALPSKYVNFLYLASHYEKLKGSPEDNEQKQLFVEQHKHYLDE
llEQISEFSKRVILADANLDKVLSAYNKHRDKPIREQAENllHLFTLTNLGAPAAFKYFDTTI
DRKRYTSTKEVLDATLIHQSITGLYETRIDLSQLGGDSGGSTNLSDllEKETGKQLVIQESIL
MLPEEVEEVIGNKPESDILVHTAYDESTDENVMLLTSDAPEYKPWALVIQDSNGENKIKMLSG
GSPKKKRKV
rAPOBEC1-XTEN-SaCas9n-UGI-NLS) (SaBE3 and
SaBE3.9max)
(SEQ ID NO: 367)
MSSETGPVAVDPTLRRRIEPHEFEVFFDPRELRKETCLLYEINWGGRHSIWRHTSQNTNKHVE
VNFIEKFTTERYFCPNTRCSITWFLSWSPCGECSRAITEFLSRYPHVTLFIYIARLYHHADPR
NRQGLRDLISSGVTIQIMTEQESGYCWRNFVNYSPSNEAHWPRYPHLWVRLYVLELYCIILGL
PPCLNILRRKQPQLTFFTIALQSCHYQRLPPHILWATGLKSGSETPGTSESATPESKRNYILG
LDIGITSVGYGIIDYETRDVIDAGVRLFKEANVENNEGRRSKRGARRLKRRRRHRIQRVKKLL
FDYNLLTDHSELSGINPYEARVKGLSQKLSEEEFSAALLHLAKRRGVHNVNEVEEDTGNELST
KEQISRNSKALEEKYVAELQLERLKKDGEVRGSINRFKTSDYVKEAKQLLKVQKAYHQLDQSF
IDTYIDLLETRRTYYEGPGEGSPFGWKDIKEWYEMLMGHCTYFPEELRSVKYAYNADLYNALN
DLNNLVITRDENEKLEYYEKFQIIENVFKQKKKPTLKQIAKEILVNEEDIKGYRVTSTGKPEF
TNLKVYHDIKDITARKEIIENAELLDQIAKILTIYQSSEDIQEELTNLNSELTQEEIEQISNL
KGYTGTHNLSLKAINLILDELWHTNDNQIAIFNRLKLVPKKVDLSQQKEIPTTLVDDFILSPV
VKRSFIQSIKVINAIIKKYGLPNDIIIELAREKNSKDAQKMINEMQKRNRQTNERIEEIIRTT
GKENAKYLIEKIKLHDMQEGKCLYSLEAIPLEDLLNNPFNYEVDHIIPRSVSFDNSFNNKVLV
KQEEASKKGNRTPFQYLSSSDSKISYETFKKHILNLAKGKGRISKTKKEYLLEERDINRFSVQ
KDFINRNLVDTRYATRGLMNLLRSYFRVNNLDVKVKSINGGFTSFLRRKWKFKKERNKGYKHH
AEDALIIANADFIFKEWKKLDKAKKVMENQMFEEKQAESMPEIETEQEYKEIFITPHQIKHIK
DFKDYKYSHRVDKKPNRELINDTLYSTRKDDKGNTLIVNNLNGLYDKDNDKLKKLINKSPEKL
LMYHHDPQTYQKLKLIMEQYGDEKNPLYKYYEETGNYLTKYSKKDNGPVIKKIKYYGNKLNAH
LDITDDYPNSRNKVVKLSLKPYRFDVYLDNGVYKFVTVKNLDVIKKENYYEVNSKCYEEAKKL
KKISNQAEFIASFYNNDLIKINGELYRVIGVNNDLLNRIEVNMIDITYREYLENMNDKRPPRI
IKTIASKTQSIKKYSTDILGNLYEVKSKKHPQIIKKGSGGSTNLSDIIEKETGKQLVIQESIL
MLPEEVEEVIGNKPESDILVHTAYDESTDENVMLLTSDAPEYKPWALVIQDSNGENKIKMLSG
GSPKKKRKV
AID-VRQR-BE4max
(SEQ ID NO: 368)
MDSLLMNRRKFLYQFKNVRWAKGRRETYLCYVVKRRDSATSFSLDFGYLRNKNGCHVELLFLR
YISDWDLDPGRCYRVTWFTSWSPCYDCARHVADFLRGNPNLSLRIFTARLYFCEDRKAEPEGL
RRLHRAGVQIAIMTFKDYFYCWNTFVENHERTFKAWEGLHENSVRLSRQLRRILLPLYEVDDL
RDAFRTLGLSGGSSGGSSGSETPGTSESATPESSGGSSGGSDKKYSIGLAIGTNSVGWAVITD
EYKVPSKKFKVLGNTDRHSIKKNLIGALLFDSGETAEATRLKRTARRRYTRRKNRICYLQEIF
SNEMAKVDDSFFHRLEESFLVEEDKKHERHPIFGNIVDEVAYHEKYPTIYHLRKKLVDSTDKA
DLRLIYLALAHMIKFRGHFLIEGDLNPDNSDVDKLFIQLVQTYNQLFEENPINASGVDAKAIL
SARLSKSRRLENLIAQLPGEKKNGLFGNLIALSLGLTPNFKSNFDLAEDAKLQLSKDTYDDDL
DNLLAQIGDQYADLFLAAKNLSDAILLSDILRVNTEITKAPLSASMIKRYDEHHQDLTLLKAL
VRQQLPEKYKEIFFDQSKNGYAGYIDGGASQEEFYKFIKPILEKMDGTEELLVKLNREDLLRK
QRTFDNGSIPHQIHLGELHAILRRQEDFYPFLKDNREKIEKILTFRIPYYVGPLARGNSRFAW
MTRKSEETITPWNFEEVVDKGASAQSFIERMTNFDKNLPNEKVLPKHSLLYEYFTVYNELTKV
KYVTEGMRKPAFLSGEQKKAIVDLLFKTNRKVTVKQLKEDYFKKIECFDSVEISGVEDRFNAS
LGTYHDLLKIIKDKDFLDNEENEDILEDIVLTLTLFEDREMIEERLKTYAHLFDDKVMKQLKR
RRYTGWGRLSRKLINGIRDKQSGKTILDFLKSDGFANRNFMQLIHDDSLTFKEDIQKAQVSGQ
GDSLHEHIANLAGSPAIKKGILQTVKVVDELVKVMGRHKPENIVIEMARENQTTQKGQKNSRE
RMKRIEEGIKELGSQILKEHPVENTQLQNEKLYLYYLQNGRDMYVDQELDINRLSDYDVDHIV
PQSFLKDDSIDNKVLTRSDKNRGKSDNVPSEEVVKKMKNYWRQLLNAKLITQRKFDNLTKAER
GGLSELDKAGFIKRQLVETRQITKHVAQILDSRMNTKYDENDKLIREVKVITLKSKLVSDFRK
DFQFYKVREINNYHHAHDAYLNAVVGTALIKKYPKLESEFVYGDYKVYDVRKMIAKSEQEIGK
ATAKYFFYSNIMNFFKTEITLANGEIRKRPLIETNGETGEIVWDKGRDFATVRKVLSMPQVNI
VKKTEVQTGGFSKESILPKRNSDKLIARKKDWDPKKYGGFVSPTVAYSVLVVAKVEKGKSKKL
KSVKELLGITIMERSSFEKNPIDFLEAKGYKEVKKDLIIKLPKYSLFELENGRKRMLASAREL
QKGNELALPSKYVNFLYLASHYEKLKGSPEDNEQKQLFVEQHKHYLDEIIEQISEFSKRVILA
DANLDKVLSAYNKHRDKPIREQAENIIHLFTLTNLGAPAAFKYFDTTIDRKQYRSTKEVLDAT
LIHQSITGLYETRIDLSQLGGDSGGSGGSGGSTNLSDIIEKETGKQLVIQESILMLPEEVEEV
IGNKPESDILVHTAYDESTDENVMLLTSDAPEYKPWALVIQDSNGENKIKMLSGGSGGSGGST
NLSDIIEKETGKQLVIQESILMLPEEVEEVIGNKPESDILVHTAYDESTDENVMLLTSDAPEY
KPWALVIQDSNGENKIKMLSGGSKRTADGSEFEPKKKRKV
BE4max-SaKKH
(SEQ ID NO: 369)
MKRTADGSEFESPKKKRKVSSETGPVAVDPTLRRRIEPHEFEVFFDPRELRKETCLLYEINWG
GRHSIWRHTSQNTNKHVEVNFIEKFTTERYFCPNTRCSITWFLSWSPCGECSRAITEFLSRYP
HVTLFIYIARLYHHADPRNRQGLRDLISSGVTIQIMTEQESGYCWRNFVNYSPSNEAHWPRYP
HLWVRLYVLELYCIILGLPPCLNILRRKQPQLTFFTIALQSCHYQRLPPHILWATGLKSGGSS
GGSSGSETPGTSESATPESSGGSSGGSGKRNYILGLAIGITSVGYGIIDYETRDVIDAGVRLF
KEANVENNEGRRSKRGARRLKRRRRHRIQRVKKLLFDYNLETDHSEESGINPYEARVKGESQK
ESEEEFSAAEEHEAKRRGVHNVNEVEEDTGNEESTKEQISRNSKAEEEKYVAEEQEEREKKDG
EVRGSINRFKTSDYVKEAKQEEKVQKAYHQEDQSFIDTYIDEEETRRTYYEGPGEGSPFGWKD
IKEWYEMEMGHCTYFPEEERSVKYAYNADEYNAENDENNEVITRDENEKEEYYEKFQIIENVF
KQKKKPTEKQIAKEIEVNEEDIKGYRVTSTGKPEFTNEKVYHDIKDITARKEIIENAEEEDQI
AKIETIYQSSEDIQEEETNENSEETQEEIEQISNEKGYTGTHNESEKAINEIEDEEWHTNDNQ
IAIFNREKEVPKKVDESQQKEIPTTEVDDFIESPVVKRSFIQSIKVINAIIKKYGEPNDIIIE
EAREKNSKDAQKMINEMQKRNRQTNERIEEIIRTTGKENAKYEIEKIKEHDMQEGKCEYSEEA
IPEEDEENNPFNYEVDHIIPRSVSFDNSFNNKVEVKQEENSKKGNRTPFQYESSSDSKISYET
FKKHIENEAKGKGRISKTKKEYEEEERDINRFSVQKDFINRNEVDTRYATRGEMNEERSYFRV
NNEDVKVKSINGGFTSFERRKWKFKKERNKGYKHHAEDAEIIANADFIFKEWKKEDKAKKVME
NQMFEEKQAESMPEIETEQEYKEIFITPHQIKHIKDFKDYKYSHRVDKKPNRKEINDTEYSTR
KDDKGNTEIVNNENGEYDKDNDKEKKEINKSPEKEEMYHHDPQTYQKEKEIMEQYGDEKNPEY
KYYEETGNYETKYSKKDNGPVIKKIKYYGNKENAHEDITDDYPNSRNKVVKESEKPYRFDVYE
DNGVYKFVTVKNEDVIKKENYYEVNSKCYEEAKKLKKISNQAEFIASFYKNDLIKINGELYRV
IGVNNDLLNRIEVNMIDITYREYEENMNDKRPPHIIKTIASKTQSIKKYSTDIEGNEYEVKSK
KHPQIIKKGSGGSGGSGGSTNESDIIEKETGKQEVIQESIEMEPEEVEEVIGNKPESDIEVHT
AYDESTDENVMEETSDAPEYKPWAEVIQDSNGENKIKMESGGSGGSGGSTNESDIIEKETGKQ
EVIQESIEMEPEEVEEVIGNKPESDIEVHTAYDESTDENVMEETSDAPEYKPWAEVIQDSNGE
NKIKMESGGSKRTADGSEFEPKKKRKV
BE4max-NRRH
(SEQ ID NO: 370)
MKRTADGSEFESPKKKRKVSSETGPVAVDPTLRRRIEPHEFEVFFDPRELRKETCLLYEINWG
GRHSIWRHTSQNTNKHVEVNFIEKFTTERYFCPNTRCSITWFLSWSPCGECSRAITEFLSRYP
HVTLFIYIARLYHHADPRNRQGLRDLISSGVTIQIMTEQESGYCWRNFVNYSPSNEAHWPRYP
HLWVRLYVLELYCIILGLPPCLNILRRKQPQLTFFTIALQSCHYQRLPPHILWATGLKSGGSS
GGSSGSETPGTSESATPESSGGSSGGSDKKYSIGLTIGTNSVGWAVITDEYKVPSKKFKVEGN
TDRHSIKKNEIGAEEFDSGETAEATRLKRTARRRYTRRKNRICYEQEIFSNEMAKVDDSFFHR
EEESFEVEEDKKHERHPIFGNIVDEVAYHEKYPTIYHERKKEVDSTDKADEREIYEAEAHMIK
FRGHFEIEGDENPDNSDVDKEFIQEVQTYNQEFEENPINASGVDAKAIESARESKSRREENEI
AQEPGEKKNGEFGNEIAESEGETPNFKSNFDEAEDAKEQESKDTYDDDEDNEEAQIGDQYADE
FEAAKNESDAIEESDIERVNTEITKAPESASMVKRYDEHHQDETEEKAEVRQQEPEKYKEIFF
DQSKNGYAGYIDGGASQEEFYKFIKPIEEKMDGTEEEEVKENREDEERKQRTFDNGIIPHQIH
EGEEHAIERRQGDFYPFEKDNREKIEKIETFRIPYYVGPEARGNSRFAWMTRKSEETITPWNF
EEVVDKGASAQSFIERMTNFDKNEPNEKVEPKHSEEYEYFTVYNEETKVKYVTEGMRKPAFES
GEQKKAIVDEEFKTNRKVTVKQEKEDYFKKIECFDSVEISGVEDRFNASEGTYHDEEKIIKDK
DFEDNEENEDIEEDIVETETEFEDREMIEEREKTYAHEFDDKVMKQEKRERYTGWGRESRKEI
NGIRDKQSGKTIEDFEKSDGFANRNFMQEIHDDSETFKEDIQKAQVSGQGDSEHEHIANEAGS
PAIKKGIEQTVKWDEEVKVMGGHKPENIVIEMARENQTTQKGQKNSRERMKRIEEGIKEEGSQ
IEKEHPVENTQEQNEKEYEYYEQNGRDMYVDQEEDINRESDYDVDHIVPQSFEKDDSIDNKVE
TRSDKNRGKSDNVPSEEVVKKMKNYWRQEENAKEITQRKFDNETKAERGGESEEDKAGFIKRQ
EVETRQITKHVAQIEDSRMNTKYDENDKEIREVKVITEKSKEVSDFRKDFQFYKVREINNYHH
AHDAYENAWGTAEIKKYPKEESEFVYGDYKVYDVRKMIAKSEQEIGKATAKYFFYSNIMNFFK
TEITEANGEIRKRPEIETNGETGEIVWDKGRDFATVRKVESMPQVNIVKKTEVQTGGFSKESI
EPKGNSDKEIARKKDWDPKKYGGFNSPTAAYSVEWAKVEKGKSKKEKSVKEEEGITIMERSSF
EKNPIGFEEAKGYKEVKKDEIIKEPKYSEFEEENGRKRMEASAGVEHKGNEEAEPSKYVNFEY
EASHYEKEKGSPEDNEQKQEFVEQHKHYEDEIIEQISEFSKRVIEADANEDKVESAYNKHRDK
PIREQAENIIHEFTETNEGVPAAFKYFDTTIDKKRYTSTKEVEDATEIHQSITGEYETRIDLS
QLGGDSGGSGGSGGSTNLSDIIEKETGKQLVIQESILMLPEEVEEVIGNKPESDILVHTAYDE
STDENVMLLTSDAPEYKPWALVIQDSNGENKIKMLSGGSGGSGGSTNLSDIIEKETGKQLVIQ
ESILMLPEEVEEVIGNKPESDILVHTAYDESTDENVMLLTSDAPEYKPWALVIQDSNGENKIK
MLSGGSKRTADGSEFEPKKKRKV
BE4max-VQR
(SEQ ID NO: 371)
MKRTADGSEFESPKKKRKVSSETGPVAVDPTLRRRIEPHEFEVFFDPRELRKETCLLYEINWG
GRHSIWRHTSQNTNKHVEVNFIEKFTTERYFCPNTRCSITWFLSWSPCGECSRAITEFLSRYP
HVTLFIYIARLYHHADPRNRQGLRDLISSGVTIQIMTEQESGYCWRNFVNYSPSNEAHWPRYP
HLWVRLYVLELYCIILGLPPCLNILRRKQPQLTFFTIALQSCHYQRLPPHILWATGLKSGGSS
GGSSGSETPGTSESATPESSGGSSGGSDKKYSIGLAIGTNSVGWAVITDEYKVPSKKFKVLGN
TDRHSIKKNLIGALLFDSGETAEATREKRTARRRYTRRKNRICYEQEIFSNEMAKVDDSFFHR
EEESFEVEEDKKHERHPIFGNIVDEVAYHEKYPTIYHERKKEVDSTDKADEREIYEAEAHMIK
FRGHFEIEGDENPDNSDVDKEFIQEVQTYNQEFEENPINASGVDAKAIESARESKSRREENEI
AQEPGEKKNGEFGNEIAESEGETPNFKSNFDEAEDAKEQESKDTYDDDEDNEEAQIGDQYADE
FEAAKNESDAIEESDIERVNTEITKAPESASMIKRYDEHHQDETEEKAEVRQQEPEKYKEIFF
DQSKNGYAGYIDGGASQEEFYKFIKPIEEKMDGTEEEEVKENREDEERKQRTFDNGSIPHQIH
EGEEHAIERRQEDFYPFEKDNREKIEKIETFRIPYYVGPEARGNSRFAWMTRKSEETITPWNF
EEVVDKGASAQSFIERMTNFDKNEPNEKVEPKHSEEYEYFTVYNEETKVKYVTEGMRKPAFES
GEQKKAIVDEEFKTNRKVTVKQEKEDYFKKIECFDSVEISGVEDRFNASEGTYHDEEKIIKDK
DFEDNEENEDIEEDIVETETEFEDREMIEEREKTYAHEFDDKVMKQEKRRRYTGWGRESRKEI
NGIRDKQSGKTIEDFEKSDGFANRNFMQEIHDDSETFKEDIQKAQVSGQGDSEHEHIANEAGS
PAIKKGIEQTVKWDEEVKVMGRHKPENIVIEMARENQTTQKGQKNSRERMKRIEEGIKEEGSQ
IEKEHPVENTQEQNEKEYEYYEQNGRDMYVDQEEDINRESDYDVDHIVPQSFEKDDSIDNKVE
TRSDKNRGKSDNVPSEEWKKMKNYWRQEENAKEITQRKFDNETKAERGGESEEDKAGFIKRQE
VETRQITKHVAQIEDSRMNTKYDENDKEIREVKVITEKSKEVSDFRKDFQFYKVREINNYHHA
HDAYENAWGTAEIKKYPKEESEFVYGDYKVYDVRKMIAKSEQEIGKATAKYFFYSNIMNFFKT
EITEANGEIRKRPEIETNGETGEIVWDKGRDFATVRKVESMPQVNIVKKTEVQTGGFSKESIE
PKRNSDKEIARKKDWDPKKYGGFVSPTVAYSVEWAKVEKGKSKKEKSVKEEEGITIMERSSFE
KNPIDFEEAKGYKEVKKDEIIKEPKYSEFEEENGRKRMEASAGEEQKGNEEAEPSKYVNFEYE
ASHYEKEKGSPEDNEQKQEFVEQHKHYEDEIIEQISEFSKRVIEADANEDKVESAYNKHRDKP
IREQAENIIHEFTETNEGAPAAFKYFDTTIDRKQYRSTKEVEDATEIHQSITGLYETRIDLSQ
LGGDSGGSGGSGGSTNLSDIIEKETGKQLVIQESILMLPEEVEEVIGNKPESDILVHTAYDES
TDENVMLLTSDAPEYKPWALVIQDSNGENKIKMLSGGSGGSGGSTNLSDIIEKETGKQLVIQE
SILMLPEEVEEVIGNKPESDILVHTAYDESTDENVMLLTSDAPEYKPWALVIQDSNGENKIKM
LSGGSKRTADGSEFEPKKKRKV
BE4max-VRQR
(SEQ ID NO: 372)
MKRTADGSEFESPKKKRKVSSETGPVAVDPTLRRRIEPHEFEVFFDPRELRKETCLLYEINWG
GRHSIWRHTSQNTNKHVEVNFIEKFTTERYFCPNTRCSITWFLSWSPCGECSRAITEFLSRYP
HVTLFIYIARLYHHADPRNRQGLRDLISSGVTIQIMTEQESGYCWRNFVNYSPSNEAHWPRYP
HLWVRLYVLELYCIILGLPPCLNILRRKQPQLTFFTIALQSCHYQRLPPHILWATGLKSGGSS
GGSSGSETPGTSESATPESSGGSSGGSDKKYSIGLAIGTNSVGWAVITDEYKVPSKKFKVLGN
TDRHSIKKNLIGALLFDSGETAEATREKRTARRRYTRRKNRICYEQEIFSNEMAKVDDSFFHR
EEESFEVEEDKKHERHPIFGNIVDEVAYHEKYPTIYHERKKEVDSTDKADEREIYEAEAHMIK
FRGHFEIEGDENPDNSDVDKEFIQEVQTYNQEFEENPINASGVDAKAIESARESKSRREENEI
AQEPGEKKNGEFGNEIAESEGETPNFKSNFDEAEDAKEQESKDTYDDDEDNEEAQIGDQYADE
FEAAKNESDAIEESDIERVNTEITKAPESASMIKRYDEHHQDETEEKAEVRQQEPEKYKEIFF
DQSKNGYAGYIDGGASQEEFYKFIKPIEEKMDGTEEEEVKENREDEERKQRTFDNGSIPHQIH
EGEEHAIERRQEDFYPFEKDNREKIEKIETFRIPYYVGPEARGNSRFAWMTRKSEETITPWNF
EEVVDKGASAQSFIERMTNFDKNEPNEKVEPKHSEEYEYFTVYNEETKVKYVTEGMRKPAFES
GEQKKAIVDEEFKTNRKVTVKQEKEDYFKKIECFDSVEISGVEDRFNASEGTYHDEEKIIKDK
DFEDNEENEDIEEDIVETETEFEDREMIEEREKTYAHEFDDKVMKQEKRRRYTGWGRESRKEI
NGIRDKQSGKTIEDFEKSDGFANRNFMQEIHDDSETFKEDIQKAQVSGQGDSEHEHIANEAGS
PAIKKGIEQTVKWDEEVKVMGRHKPENIVIEMARENQTTQKGQKNSRERMKRIEEGIKEEGSQ
IEKEHPVENTQEQNEKEYEYYEQNGRDMYVDQEEDINRESDYDVDHIVPQSFEKDDSIDNKVE
TRSDKNRGKSDNVPSEEWKKMKNYWRQEENAKEITQRKFDNETKAERGGESEEDKAGFIKRQE
VETRQITKHVAQIEDSRMNTKYDENDKEIREVKVITEKSKEVSDFRKDFQFYKVREINNYHHA
HDAYENAWGTAEIKKYPKEESEFVYGDYKVYDVRKMIAKSEQEIGKATAKYFFYSNIMNFFKT
EITEANGEIRKRPEIETNGETGEIVWDKGRDFATVRKVESMPQVNIVKKTEVQTGGFSKESIE
PKRNSDKEIARKKDWDPKKYGGFVSPTVAYSVEWAKVEKGKSKKEKSVKEEEGITIMERSSFE
KNPIDFEEAKGYKEVKKDEIIKEPKYSEFEEENGRKRMEASAREEQKGNEEAEPSKYVNFEYE
ASHYEKEKGSPEDNEQKQEFVEQHKHYEDEIIEQISEFSKRVIEADANEDKVESAYNKHRDKP
IREQAENIIHEFTETNEGAPAAFKYFDTTIDRKQYRSTKEVEDATEIHQSITGLYETRIDLSQ
LGGDSGGSGGSGGSTNLSDIIEKETGKQLVIQESILMLPEEVEEVIGNKPESDILVHTAYDES
TDENVMLLTSDAPEYKPWALVIQDSNGENKIKMLSGGSGGSGGSTNLSDIIEKETGKQLVIQE
SILMLPEEVEEVIGNKPESDILVHTAYDESTDENVMLLTSDAPEYKPWALVIQDSNGENKIKM
LSGGSKRTADGSEFEPKKKRKV

[0394] These disclosed CBEs exhibit low off-target editing frequencies, and in particular low Cas9-independent off-target editing frequencies, while exhibiting high on-target editing efficiencies. For example, the YE1-BE4, YE1-CP1028, YE1-SpCas9-NG, R33A-BE4, and R33A+K34A-BE4-CP1028 base editors may exhibit off-target editing frequencies of less than 0.75% (e.g., about 0.4% or less) while maintaining on-target editing efficiencies of about 60% or more, in target sequences in mammalian cells. (See, e.g., FIGS. 11, 15A, 15B and 17.) The Examples of the present disclosure suggest that CBEs with cytosine deaminases that have a low instrinsic catalytic efficiency (k_{cat}/Kₘ) for cytosine-containing ssDNA substrates exhibit reduced Cas9-independent off-target deamination.

[0395] In some embodiments, the base editor comprises an amino acid sequence that is at least 60%, at least 65%, at least 70%, at least 75%, at least 80%, at least 85%, at least 90%, at least 95%, at least 96%, at least 97%, at least 98%, at least 99%, or at least 99.5% identical to any one of the amino acid sequences set forth in any one of SEQ ID NOs: 350-372, or to any of the base editors described herein. In some embodiments, the base editor comprises an amino acid sequence that has 1, 2, 3, 4, 5, 6, 7, 8, 9, 10, 11, 12, 13, 14, 15, 16, 17, 18, 19, 20, 21, 22, 21, 24, 25, 26, 27, 28, 29, 30, 31, 32, 33, 34, 35, 36, 37, 38, 39, 40, 41, 42, 43, 44, 45, 46, 47, 48, 49, 50, or more mutations compared to any one of the amino acid sequences set forth in SEQ ID NOs: 350-372, or any of the base editors described herein. In some embodiments, the base editor comprises an amino acid sequence that has at least 5, at least 10, at least 15, at least 20, at least 25, at least 30, at least 35, at least 40, at least 45, at least 50, at least 60, at least 70, at least 80, at least 90, at least 100, at least 110, at least 120, at least 130, at least 140, at least 150, at least 160, at least 170, at least 200, at least 300, at least 400, at least 500, at least 600, at least 700, at least 800, at least 900, at least 1000, at least 1100, at least 1200, at least 1300, at least 1400, at least 1500, at least 1600, at least 1700, at least 1750, or at least 1800 identical contiguous amino acid residues as compared to any one of the amino acid sequences set forth in SEQ ID NOs: 350-372, or any of the base editors described herein. In some embodiments, the base editor (base editor) comprises the amino acid sequence of SEQ ID NO: 350, or a variant thereof that is at lest 60%, at least 65%, at least 70%, at least 75%, at least 80%, at least 85%, at least 90%, at least 95%, at least 96%, at least 97%, at least 98%, at least 99%, or at least 99.5% identical.

[0396] In some embodiments, the base editors described herein are capable of modifying a specific nucleotide base without generating a significant proportion of indels. An “indel”, as used herein, refers to the insertion or deletion of a nucleotide base within a nucleic acid. Such insertions or deletions can lead to frame shift mutations within a coding region of a gene. In some embodiments, it is desirable to generate base editors that efficiently modify (e.g. mutate or deaminate) a specific nucleotide within a nucleic acid, without generating a large number of insertions or deletions (i.e., indels) in the nucleic acid. In certain embodiments, any of the base editors described herein are capable of generating a greater proportion of intended modifications (e.g., point mutations or deaminations) versus indels. In some embodiments, the base editors described herein are capable of generating a ratio of intended point mutations to indels that is greater than 1:1. In some embodiments, the base editors described herein are capable of generating a ratio of intended point mutations to indels that is at least 1.5:1, at least 2:1, at least 2.5:1, at least 3:1, at least 3.5:1, at least 4:1, at least 4.5:1, at least 5:1, at least 5.5:1, at least 6:1, at least 6.5:1, at least 7:1, at least 7.5:1, at least 8:1, at least 10:1, at least 12:1, at least 15:1, at least 20:1, at least 25:1, at least 30:1, at least 40:1, at least 50:1, at least 100:1, at least 200:1, at least 300:1, at least 400:1, at least 500:1, at least 600:1, at least 700:1, at least 800:1, at least 900:1, or at least 1000:1, or more. The number of intended mutations and indels may be determined using any suitable method. In some embodiments, to calculate indel frequencies, sequencing reads are scanned for exact matches to two 10-bp sequences that flank both sides of a window in which indels might occur. If no exact matches are located, the read is excluded from analysis. If the length of this indel window exactly matches the reference sequence the read is classified as not containing an indel. If the indel window is two or more bases longer or shorter than the reference sequence, then the sequencing read is classified as an insertion or deletion, respectively.

[0397] In some embodiments, the base editors described herein are capable of limiting formation of indels in a region of a nucleic acid. In some embodiments, the region is at a nucleotide targeted by a base editor or a region within 2, 3, 4, 5, 6, 7, 8, 9, or 10 nucleotides of a nucleotide targeted by a base editor. In some embodiments, any of the base editors described herein are capable of limiting the formation of indels at a region of a nucleic acid to less than 1%, less than 1.5%, less than 2%, less than 2.5%, less than 3%, less than 3.5%, less than 4%, less than 4.5%, less than 5%, less than 6%, less than 7%, less than 8%, less than 9%, less than 10%, less than 12%, less than 15%, or less than 20%. The number of indels formed at a nucleic acid region may depend on the amount of time a nucleic acid (e.g., a nucleic acid within the genome of a cell) is exposed to a base editor. In some embodiments, an number or proportion of indels is determined after at least 1 hour, at least 2 hours, at least 6 hours, at least 12 hours, at least 24 hours, at least 36 hours, at least 48 hours, at least 3 days, at least 4 days, at least 5 days, at least 7 days, at least 10 days, or at least 14 days of exposing a nucleic acid (e.g., a nucleic acid within the genome of a cell) to a base editor.

[0398] Some aspects of the disclosure are based on the recognition that any of the base editors described herein are capable of efficiently generating an intended mutation, such as a point mutation, in a nucleic acid (e.g. a nucleic acid within a genome of a subject) without generating a significant number of unintended mutations, such as unintended point mutations. In some embodiments, an intended mutation is a mutation that is generated by a specific base editor bound to a gRNA, specifically designed to generate the intended mutation. In some embodiments, the intended mutation is a mutation associated with a disease or disorder. In some embodiments, the intended mutation is an adenine (A) to guanine (G) point mutation associated with a disease or disorder. In some embodiments, the intended mutation is a thymine (T) to cytosine (C) point mutation associated with a disease or disorder. In some embodiments, the intended mutation is an adenine (A) to guanine (G) point mutation within the coding region of a gene. In some embodiments, the intended mutation is a thymine (T) to cytosine (C) point mutation within the coding region of a gene. In some embodiments, the intended mutation is a point mutation that generates a stop codon, for example, a premature stop codon within the coding region of a gene. In some embodiments, the intended mutation is a mutation that eliminates a stop codon. In some embodiments, the intended mutation is a mutation that alters the splicing of a gene. In some embodiments, the intended mutation is a mutation that alters the regulatory sequence of a gene (e.g., a gene promotor or gene repressor). In some embodiments, any of the base editors described herein are capable of generating a ratio of intended mutations to unintended mutations (e.g., intended point mutations:unintended point mutations) that is greater than 1:1. In some embodiments, any of the base editors described herein are capable of generating a ratio of intended mutations to unintended mutations (e.g., intended point mutations:unintended point mutations) that is at least 1.5:1, at least 2:1, at least 2.5:1, at least 3:1, at least 3.5:1, at least 4:1, at least 4.5:1, at least 5:1, at least 5.5:1, at least 6:1, at least 6.5:1, at least 7:1, at least 7.5:1, at least 8:1, at least 10:1, at least 12:1, at least 15:1, at least 20:1, at least 25:1, at least 30:1, at least 40:1, at least 50:1, at least 100:1, at least 150:1, at least 200:1, at least 250:1, at least 500:1, or at least

### Reduced Off-Target Effects

[0399] Guide RNA-dependent off-target base editing has been reduced through strategies including installation of mutations that increase DNA specificity into the Cas9 domain of any of the disclosed base editors, adding 5′ guanosine nucleotides to the sgRNA, or delivery of the base editor as a ribonucleoprotein complex (RNP). Guide RNA-independent off-target editing can arise from binding of the deaminase domain of a base editor to C or A bases in a Cas9-independent manner. The off-target effects of the disclosed base editors may be measured using assays and methods disclosed in International Application No. PCT/US2020/624628, filed Nov. 25, 2020, and International Publication No. WO 2020/160514, published Aug. 6, 2020, each of which is incorporated herein by reference. It will be appreciated that various methods and assays exist in the art for evaluation of the off-target effects of any of the disclosed base editors, such as EndoV-Seq, GUIDE-Seq, CIRCLE-Seq, and Cas-OFFinder.

[0400] In some aspects, provided herein are base editors and methods of editing DNA by contacting DNA with any of these disclosed base editors that generate (or cause) reduced off-target effects. In various embodiments, methods are designed for determining the off-target editing frequencies of napDNAbp domain-independent (e.g., Cas9-independent) (or gRNA-independent) off-target editing events. Editing events may comprise deamination events of a BE. Off-target deamination events that are dependent on the napDNAbp-guide RNA complex tend to be in sequences that have high sequence identity (e.g., greater than 60% sequence identity) to the target sequence. These types of events arise because of imperfect hybridization of the napDNAbp-guide RNA complex to sequences that share identity with the target sequence. In contrast, off-target events that occur independently of the napDNAbp-guide RNA complex arise as a result of stochastic binding of rhe base editor to DNA sequences (often sequences that do not share high sequence identity with the target sequence) due to an intrinsic affinity of the base editor of the nucleotide modification domain (e.g., the deaminase domain) of the base editor with DNA. NapDNAbp-independent (e.g., Cas9-independent) editing events arise in particular when the base editor is overexpressed in the system under evaluation, such as a cell or a subject.

[0401] The disclosed BEs exhibit low off-target editing frequencies, and in particular low off-target editing frequencies in the USH2A genomic sequence or cDNA sequence, while exhibiting high on-target editing efficiencies. In some embodiments, the disclosed Bes exhibit low off-target editing frequencies, and in particular low Cas9-independent off-target editing frequencies, while exhibiting high on-target editing efficiencies when used a variety of Cas homologs and other napDNAbps.

[0402] In some embodiments, the disclosed base editors cause off-target DNA editing (e.g. off-target deamination) frequencies of less than 1.5% (such as less than 1.25%, less than 1.0%, less than 0.75%, or less than 0.5%). The disclosed base editors may further provide (or yield) on-target editing efficiencies of greater than 60% (such as greater than 70%, greater than 75%, greater than 80%, greater than 85%, greater than 89%, greater than 90%, greater than 95%, or greater than 98%) at the target nucleobase pair for one or more base editors under evaluation. These methods may yield an on-target editing efficiency of greater than 50% and a frequency of off-target editing of less than 1.5% for one or more base editors under consideration. In some embodiments, such as methods using the ABE8 editor, the disclosed methods may yield an on-target editing efficiency of 89.4% and a frequency of off-target editing of 1.77%. In some embodiments, such as methods using the BE3.9 editor, the disclosed methods may yield an on-target editing efficiency of 59.5% and a frequency of off-target editing of less than 5% or less than 1%.

[0403] In some embodiments, the disclosed BEs and editing methods comprising the step of contacting a DNA with any of the disclosed BEs result in an actual or average off-target DNA editing frequency of about 2.0% or less, 1.75% or less, 1.5% or less, 1.2% or less, 1% or less, 0.9% or less, 0.8% or less, 0.75% or less, 0.7% or less, 0.65% or less, or 0.6% or less. In some embodiments, the disclosed editing methods result in an actual or average off-target DNA editing frequency of 0.5%, less than 0.5%, less than 0.4%, less than 0.35%, less than 0.3%, less than 0.25%, less than 0.2%, or less than 0.1%. In a particular embodiment, the methods result in an actual or average off-target DNA editing frequency of about 0.32% to about 1.3% (for instance, methods for evaluating the off-target frequencies of ABEs). These off-target editing frequencies may be obtained in sequences having any level of sequence identity to the target sequence. As used herein to refer to off-target DNA editing frequencies, the modifier “average” refers to a mean value over all editing events detected at sites other than a given target nucleobase pair (e.g., as detected by high-throughput sequencing such as next-generation sequencing (NGS), or Sanger sequencing).

[0404] In some embodiments, the disclosed editing methods further result in an actual or average Cas9-independent off-target DNA editing frequency of about 2.0% or less, 1.75% or less, 1.5% or less, 1.2% or less, 1% or less, 0.9% or less, 0.8% or less, 0.75% or less, 0.7% or less, 0.65% or less, or 0.6% or less. In other words, the disclosed editing methods further result in an actual or average off-target DNA editing frequency of about 2.0% or less, 1.75% or less, 1.5% or less, 1.2% or less, 1% or less, 0.9% or less, 0.8% or less, 0.75% or less, 0.7% or less, 0.65% or less, or 0.6% or less in sequences having 60% or less sequence identity to the target sequence. In some embodiments, the disclosed editing methods result in an actual or average off-target DNA editing frequency 0.5%, less than 0.5%, less than 0.4%, less than 0.35%, less than 0.3%, less than 0.25%, less than 0.2%, or less than 0.1%, in sequences having 60% or less sequence identity to the target sequence. In some embodiments, these editing frequencies are obtained in sequences comprising protospacer sequences having 5, 6, 7, 8, 9, 10, or more than 10 mismatches relative to protospacer sequence of the target sequence. In a particular embodiment, the methods result in an actual or average Cas9-independent off-target DNA editing frequency of 0.4% or less.

[0405] In various embodiments, the disclosed editing methods result in an on-target DNA base editing efficiency of at least about 35%, 40%, 50%, 60%, 70%, 80%, 85%, 90%, 95%, 98%, or 99% at the target nucleobase pair. The step of contacting may result in in a DNA base editing efficiency of at least about 60%, 61%, 62%, 63%, 64%, 65%, 66%, 67%, 68%, 69%, 70%, 71%, 72%, 73%, 74%, or 75%. In particular, the step of contacting results in on-target base editing efficiencies of greater than 75%, greater than 80%, greater than 85%, greater than 88%, greater than 89%, greater than 90%, or greater than 95%. In certain embodiments, base editing efficiencies of 89% may be realized. In certain embodiments, base editing efficiencies of 99% may be realized.

[0406] Some aspects of the disclosure are based on the recognition that any of the base editors described herein are capable of efficiently generating an intended mutation, such as a point mutation, in DNA (e.g. DNA within a genome of a subject) without generating a significant number of unintended mutations, such as unintended point mutations. In some embodiments, an intended mutation is a mutation that is generated by a specific base editor bound to a gRNA, specifically designed to generate the intended mutation (e.g. deamination). In some embodiments, the intended mutation is a mutation associated with a disease or disorder, such as Usher syndrome type 2A.

[0407] In some embodiments, the intended mutation is a deamination that generates a stop codon, for example, a premature stop codon within the coding region of a gene. In some embodiments, the intended mutation is a mutation that eliminates a stop codon. In some embodiments, the intended mutation eliminates a stop codon comprising the nucleic acid sequence 5′-TAG-3′, 5′-TAA-3′, or 5′-TGA-3′. Generation of a stop codon in a sequence positioned 5′ of an exon with a disease-causing mutation (e.g., in a subject's or cell's genome) allows the “skipping” of this exon during transcription and/or mRNA processing. Exon skipping may result in generation of a mutated protein that restores ciliogenesis, hair cell morphology, and auditory function in the inner ear (either partially or completely), and/or mitigates early abnormalities in mouse retina (either partially or completely).

[0408] In some embodiments, the intended mutation is a deamination that alters the regulatory sequence of a gene (e.g., a gene promoter or gene repressor). In some embodiments, the intended mutation is a deamination introduced into the gene promoter. In particular embodiments, the deamination introduced into the gene promoter leads to a decrease in the transcription of a gene operably linked to the gene promoter. In other embodiments, the deamination leads to an increase in the transcription of a gene operably linked to the gene promoter. In some embodiments, the deamination introduced into a regulatory sequence of the gene, or the gene itself, reverses a frameshift mutation in the USH2A gene that generates a premature stop codon (which results in a truncated USH2A translation product).

[0409] In some embodiments, the intended mutation is a deamination that alters the splicing of a gene. Accordingly, in some embodiments, the intended deamination results in the introduction of a splice site in a gene. In other embodiments, the intended deamination results in the removal of a splice site. The introduction of a splice site in a sequence positioned 5′ of an exon with a disease-causing mutation allows the “skipping” of this exon during transcription and/or mRNA processing.

[0410] In some embodiments, the target nucleotide sequence is a DNA sequence in a genome, e.g. a eukaryotic genome. In certain embodiments, the target nucleotide sequence is in a mammalian (e.g. a human) genome. In certain embodiments, the target nucleotide sequence is in a human genome. In other embodiments, the target nucleotide sequence is in the genome of a rodent, such as a mouse or a rat. In other embodiments, the target nucleotide sequence is in the genome of a domesticated animal, such as a horse, cat, dog, or rabbit. In some embodiments, the target nucleotide sequence is in the genome of a research animal. In some embodiments, the target nucleotide sequence is in the genome of a genetically engineered non-human subject. In some embodiments, the target nucleotide sequence is in the genome of a plant. In some embodiments, the target nucleotide sequence is in the genome of a microorganism, such as a bacteria.

### Guide RNA Sequences

[0411] Some aspects of the invention relate to guide sequences (“guide RNA” or “gRNA”) that are capable of guiding a napDNAbp or a base editor comprising a napDNAbp to a target site in USH2A. In various embodiments base editors (e.g., base editors described herein) can be complexed, bound, or otherwise associated with (e.g., via any type of covalent or non-covalent bond) one or more guide sequences, i.e., the sequence which becomes associated or bound to the base editor and directs its localization to a specific target sequence having complementarity to the guide sequence or a portion thereof. The particular design aspects of a guide sequence will depend upon the nucleotide sequence of a genomic target site of interest (e.g., the C100, G11864, G12575, C13274, or C14803 residues of human USH2A) and the type of napDNA/RNAbp (e.g., type of Cas protein) present in the base editor, among other factors, such as PAM sequence locations, percent G/C content in the target sequence, the degree of microhomology regions, secondary structures, etc. The present disclosure also provides compositions of guide RNAs. The present disclosure also provides methods of editing target DNA sequences in an USH2A gene using compositions and/or complexes comprising any of the disclosed guide RNAs.

[0412] In general, a guide sequence is any polynucleotide sequence having sufficient complementarity with a target polynucleotide sequence to hybridize with the target sequence and direct sequence-specific binding of a napDNA/RNAbp (e.g., a Cas9, Cas9 homolog, or Cas9 variant) to the target sequence, such as a sequence within a USH2A gene. In some embodiments, the degree of complementarity between a guide sequence and its corresponding target sequence (e.g., USH2A), when optimally aligned using a suitable alignment algorithm, is about or more than about 50%, 60%, 75%, 80%, 85%, 88%, 89%, 90%, 95%, 97.5%, 99%, or more. Optimal alignment may be determined with the use of any suitable algorithm for aligning sequences, non-limiting example of which include the Smith-Waterman algorithm, the Needleman-Wunsch algorithm, algorithms based on the Burrows-Wheeler Transform (e.g. the Burrows Wheeler Aligner), ClustalW, Clustal X, BLAT, Novoalign (Novocraft Technologies, ELAND (Illumina, San Diego, Calif.), SOAP (available at soap.genomics.org.cn), and Maq (available at maq.sourceforge.net). In some embodiments, a guide sequence is about or more than about 5, 10, 11, 12, 13, 14, 15, 16, 17, 18, 19, 20, 21, 22, 23, 24, 25, 26, 27, 28, 29, 30, 31, 32, 33, 34, 35, 40, 45, 50, or more nucleotides in length.

[0413] In some aspects, the present disclosure provides compositions comprising the base editors with reduced RNA editing effects as described herein and one or more guide RNAs, e.g., a single-guide RNA (“sgRNA”). In addition, the present disclosure provides for nucleic acid molecules encoding and/or expressing the base editors as described herein, as well as expression vectors or constructs for expressing the base editors described herein and a gRNA, host cells comprising said nucleic acid molecules and expression vectors, and optionally one or more gRNAs, and compositions for delivering and/or administering nucleic acid-based embodiments described herein.

[0414] In some embodiments, a guide sequence is less than about 35, 30, 25, 20, 15, 12, or fewer nucleotides in length. The ability of a guide sequence to direct sequence-specific binding of a base editor to a target sequence may be assessed by any suitable assay. For example, the components of a base editor, including the guide sequence to be tested, may be provided to a host cell having the corresponding target sequence (e.g., a HGADFN 167 or HGADFN 188 cell line), such as by transfection with vectors encoding the components of a base editor disclosed herein, followed by an assessment of preferential cleavage within the target sequence. Similarly, cleavage of a target polynucleotide sequence may be evaluated in a test tube by providing the target sequence, components of a base editor, including the guide sequence to be tested and a control guide sequence different from the test guide sequence, and comparing binding or rate of cleavage at the target sequence between the test and control guide sequence reactions. Other assays are possible, and will occur to those skilled in the art.

[0415] In some embodiments, the guide RNAs for use in accordance with the disclosed methods of editing comprise synthetic single guide RNAs (sgRNAs) containing modified ribonucleotides. In some embodiments, the guide RNAs contain modifications such as 2′-0-methylated nucleotides and phosphorothioate linkages. In some embodiments, the guide RNAs contain 2′-0-methyl modifications in the first three and last three nucleotides, and phosphorothioate bonds between the first three and last three nucleotides. Exemplary modified synthetic sgRNAs are disclosed in Hendel A. et al., Nat. Biotechnol. 33, 985-989 (2015), incorporated herein by reference.

[0416] In some embodiments, the guide RNA comprises a structure 5′-[guide sequence]-[Cas9-binding sequence]-3′, where the Cas9-binding sequence (or scaffold) comprises a nucleic acid sequence that is at least 80%, 85%, 90%, 95%, 96%, 97%, 98%, 99%, or 99.5% identical to any one of SEQ ID NOs: 170 and 443-446, or SEQ ID NOs: 170 and 443-446 absent the poly-U terminator sequence at the 3′ end. In some embodiments, the disclosed guide RNA comprises a Cas9 binding sequence comprises a nucleic acid sequence that is at least 80%, 85%, 90%, 95%, 96%, 97%, 98%, 99%, or 99.5% identical to SEQ ID NO: 170. In various embodiments, the Cas9-binding sequence comprises the sequence: 5′-[guide sequence]-gttttagagctagaaatagcaagttaaaataaggctagtccgttatcaacttgaaaaagtggcaccgagtcggtgc-3′ (SEQ ID NO: 170).

[0417] In various embodiments, the guide RNA scaffold binds an S. pyogenes Cas9. In other embodiments, the guide RNA scaffold binds an S. aureus Cas9. In some embodiments, the guide RNAs for use in accordance with the disclosed methods of editing comprise a backbone structure that is recognized by an S. pyo genes Cas9 protein or domain, such as an SpCas9 domain of the disclosed base editors. The backbone structure recognized by an SpCas9 protein may comprise the sequence 5′-[guide sequencel-guuuuagagcuagaaauagcaaguuaaaauaaggcuaguccguuaucaacuugaaaaaguggcaccgagucggugcuuu uu-3′ (SEQ ID NO: 443), wherein the guide sequence comprises a sequence that is complementary to the protospacer of the target sequence. See U.S. Publication No. 2015/0166981, published Jun. 18, 2015, the disclosure of which is incorporated by reference herein. In other embodiments, the guide RNAs for use in accordance with the disclosed methods of editing comprise a backbone structure that is recognized by an S. aureus Cas9 protein. The backbone structure recognized by an SaCas9 protein may comprise the sequence 5′-[guide sequence]-guuuuaguacucuguaaugaaaauuacagaaucuacuaaaacaaggcaaaaugccguguuuaucucgucaacuuguugg cgagauuuuuuu-3′ (SEQ ID NO: 444).

[0418] In other embodiments, the guide RNAs for use in accordance with the disclosed methods of editing comprise a backbone structure that is recognized by an Lachnospiraceae bacterium Cas12a protein. The backbone structure recognized by an LbCas12a protein may comprise the sequence 5′-[guide sequence]-uaauuucuacuaaguguagau-3′ (SEQ ID NO: 445). In other embodiments, the guide RNAs for use in accordance with the disclosed methods of editing comprise a backbone structure that is recognized by an Acidaminococcus sp. BV3L6 Cas12a protein. The backbone structure recognized by an AsCas12a protein may comprise the sequence 5′-[guide sequence]-uaauuucuacucuuguagau-3′ (SEQ ID NO: 446).

[0419] The guide sequence (or spacer) is typically approximately 20 nucleotides long. Examplary spacer and scaffold sequences for the guide RNAs used in the exon-skipping approach are listed in Table 7, below:

TABLE 7
Exon-Skipping Approach Guide Sequences

gRNA Spacer (SEQ ID NOs:
36-63 and 198)
GCUUUAGGGCUUAGGUGUGAU
GGAGcUaaaUUacaaUgaag
GCAGAGGAACcUagagaaga
CCGAAACcUagcaaaUagUa
AUcUaaagcaaaagacaagc
CAGcUgUcaacaaUaaaUgc
UUCACcUgUcaaUUUaggac
gRNA Spacer (SEQ ID NOs:
36-63 and 198)
AGACcUagaaaaagcaagca
AUCCcUUUaaagagagagag
UGUUCCcUgUaagaaaaUUa
GGcUagacaaaaggaagaac
GUAUCUUUAGGGCUUAGGUGU
CCCUAAAGAUAAAAUAUAUU
AAUUAUUCcUagagaaaUUa
aUUUagCACCAGCACAACUG
UGGAGcUgUgaaggaaUaaa
UUUaUUaUagGCAUAUUGAC
UCUUGUGGGGcUgUggaaga
AUUACCUAcUgaUUaaaaaa
AUcUaaagcaaaagacaagc
GGcUagacaaaaggaagaac
CCUUUUUCUUCCgaUcUgUU
CCCcUgagaaggaagUUgcU
CGAAACcUagcaaaUagUaa
CCGAAACcUagcaaaUagUa
GAAACcUagcaaaUagUaag
UACUUCACcUgUcaaUUUag
CAUACUUCACcUgUcaaUUU
ccUgcagAGAUAAUCCAAAA

[0420] In some embodiments, the guide sequence comprises a spacer that comprises a nucleic acid sequence that is at least 90%, at least 95%, at least 98%, or at least 99% identical to any one of SEQ ID NOs: 36, 46, 47, 50, 53, 56, 57, and 93. In other embodiments, the guide RNA comprises a nucleic acid sequence that is at least 90%, at least 95%, at least 98%, or at least 99% identical to any one of SEQ ID NOs: 12, 15, 16, 18, 19, 36, 47, and 93. A guide sequence designed for the exon skipping approach of USH2A base editing may comprise any of the sequences of SEQ ID NOs: 36-63 and 92-94. In some embodiments, the guide sequence comprises a nucleic acid sequence that is at least 90%, at least 95%, at least 98%, or at least 99% identical to any one of SEQ ID NOs: 36, 46, 47, 50, 53, 56, 57, and 93. In other embodiments, the guide sequence comprises a nucleic acid sequence that is at least 90%, at least 95%, at least 98%, or at least 99% identical to any one of SEQ ID NOs: 37, 40,

[0421] In some embodiments, the guide RNA comprises a nucleic acid sequence that differs by 1, 2, 3, 4, 5, 6, 7, 8, 9, 10 or more than 10 nucleotides from the nucleotide sequences of any one of SEQ ID NOs: 1-63 or 92-94. In some embodiments, the guide RNA comprises a nucleic acid sequence that differs by 1, 2, 3, 4, 5, 6, 7, 8, 9, 10 or more than 10 nucleotides from the nucleotide sequences of any one of SEQ ID NOs: 36, 46, 47, 50, 53, 56, 57, and 93. In other embodiments, the guide RNA comprises a nucleic acid sequence that differs by 1, 2, 3, 4, 5, 6, 7, 8, 9, 10 or more than 10 nucleotides from the nucleotide sequences of any one of any one of SEQ ID NOs: 12, 15, 16, 18, 19, 36, 47, and 93. The guide RNAs may differ by no more than 5 nucleotides from the nucleotide sequences of any one of SEQ ID NOs: 1-63 or 92-94. A guide sequence designed for the exon skipping approach of USH2A base editing may comprise any of the sequences of SEQ ID NOs: 36-63 and 92-94. In some embodiments, the guide sequence comprises a nucleic acid sequence that is at least 90%, at least 95%, at least 98%, or at least 99% identical to any one of SEQ ID NOs: 36, 46, 47, 50, 53, 56, 57, and 93. In other embodiments, the guide sequence comprises a nucleic acid sequence that is at least 90%, at least 95%, at least 98%, or at least 99% identical to any one of SEQ ID NOs: 37, 40, and 44. It should be appreciated, however, that changes to such guide sequences can be made based on the specific USH2A sequence found within a cell, for example the cell of a patient having Usher syndrome or arRP. Such suitable guide RNA sequences typically comprise guide sequences that are complementary to a nucleic sequence within 50 nucleotides upstream or downstream of the target nucleotide to be edited.

[0422] Examplary protospacer and scaffold sequences for the guide RNAs used in the mutation-correction approach (cytosine base editing) are listed in Table 8, below:

TABLE 8
Mutation-Correction Approach Guide
Sequences (CBEs) gRNA Spacer

(SEQ ID NOs: 199, 200, 214,
and 201208)
CUCUUACCUUGGGAAAGGAG
UUCCUUCCCGCAUCAGGGAA
UUCCCCGUAAGAAAAUUAAC
AUCCAAAGCAAAAGACAAGC
AUUGGUGAUUCCCGCUGUGG
UAACAGGAAUAUUUGGUAUA
UAGACGCCUCUGCUCCCAGG
AUGAGUCUACUAUUACUCUC
CUUAAACCGGAGAAAACCUA
GGGCAGCGUGAGUGCAAAAA
gRNA Spacer (SEQ ID NOs: 199,
200, 214, and 201208)
CUCUAAAGUAAAAUAAAUCC

[0423] Examplary protospacer and scaffold sequences for the guide RNAs used in the mutation-correction approach (adenine base editing) are listed in Table 9, below:

TABLE 9
Mutation-Correction Approach
Guide Sequences (ABEs)

gRNA Spacer (SEQ ID NOs: 209-213,
329, and 215-232)
GUAGUCAUUAACACAAACUC
CAACCAUGCAAGCUUUCAGC
GCUUCAGAGAAAUUUAAAUC
UGAUUCACAGAUGCUUCGAG
GCUCAGUACUGAGGCACUGU
UUCAAAAGCUGGCCUUAAUG
AGACCUCAUGACUCAGUCAA
CCAUUCAUGCAGGCUACAAG
UCCAUUAUCCAGGCAGAUUU
UGUCAGAAGAAUGCAAGAUU
AACCAUGACACUCUAUUAUC
UUGUCAGAAAAAGUAAUCCU
CUACCCUGUCUUAGCAUUAC
ACUAAUUACACCUUCUUCCU
AACUCAACUUUCCUCAGAUG
AACUUCACGGGAGCCCUCCC
UUCGGUAGUUGCAUGAAGGA
AGCAGGUCAUGAGGGUCUUG
UCUAGCCAUGGCCAUCAUGA
GUACAGCAUUCUGCCACAGC
CCACUCAUGCAGGCUUGGAG
AAUUCAUAUUUCAUACCUUC
CGGCAUCUUAACACUUCCUU
CAGGCACUAGCCACUGAUUG

[0424] In some embodiments, the guide RNA comprises a nucleic acid sequence that is at least 90%, at least 95%, at least 98%, or at least 99% identical to any one of SEQ ID NOs: 199-232 and 329. In other embodiments, the guide RNA comprises a nucleic acid sequence that comprises any one of SEQ ID NOs: 199-203. In some embodiments, the guide RNA comprises a nucleic acid sequence that differs by 1, 2, 3, 4, 5, 6, 7, 8, 9, 10 or more than 10 nucleotides from the nucleotide sequences of any one of SEQ ID NOs: 199-203. In some embodiments, the guide RNA comprises a nucleic acid sequence that comprises a sequence that is at least 90%, at least 95%, at least 98%, or at least 99% identical to any one of SEQ ID NOs: 199-232 and 329, and comprises a sequence (a scaffold sequence) that is at least 90%, at least 95%, at least 98%, or at least 99% identical to SEQ ID NO: 170. In some embodiments, the guide RNA comprises a nucleic acid sequence that comprises a sequence of any one of SEQ ID NOs: 199-232 and 329, and comprises a sequence (a scaffold sequence) of SEQ ID NO: 170. In various embodiments, the guide RNA comprises the the guide RNA comprises a first nucleic acid sequence that comprises any one of SEQ ID NOs: 199-203 and a second nucleic acid sequence that comprises SEQ NO: 170 without any intervening sequences (e.g., linker sequences). In other embodiments, the guide RNA comprises the the guide RNA comprises a first nucleic acid sequence that comprises any one of SEQ ID NOs: 199-203 and a second nucleic acid sequence that comprises SEQ NO: 170 with an intervening linker sequence. In some embodiments, the guide RNA sequence may be described completely by its spacer (first) sequence and its scaffold (sequence) sequence.

[0425] In some embodiments, the the guide RNA comprises a nucleic acid sequence that differs by 1, 2, 3, 4, 5, 6, 7, 8, 9, 10, 11, 12, 13, 14, 15, or more than 15 nucleotides from the nucleotide sequences of SEQ ID NO: 170. In other embodiments, the guide RNA comprises a first nucleic acid sequence that differs by 1, 2, 3, 4, 5, 6, 7, 8, 9, 10, or more than 10 nucleotides from the nucleotide sequences of any one of any one of SEQ ID NOs: 199-232 and 329 and a second nucleic acid sequence that differs by 1, 2, 3, 4, 5, 6, 7, 8, 9, 10, 11, 12, 13, 14, 15, or more than 15 nucleotides from the nucleotide sequences of SEQ ID NO: 170. In certain embodiments, the guide RNA comprises a first sequence that differs by no more than 5 nucleotides from the nucleotide sequences of any one of SEQ ID NOs: 199-232 and 329and a second sequence that differs by no more than 5 nucleotides from the nucleotide sequence of SEQ ID NO: 170. In certain embodiments, the guide RNA comprises any one of SEQ ID NOs: 199-232 and 329 and SEQ ID NO: 170.

[0426] Accordingly, in some aspects, the disclosure provides compositions comprising a guide RNA that comprises a first nucleic acid sequence that differs by 1, 2, 3, 4, 5, or 6 nucleotides from the nucleotide sequences of any one of any one of SEQ ID NOs: 36-63, 198, 199-232 and 329, and a second nucleic acid sequence that differs by 1, 2, 3, 4, 5, 6, 7, 8, 9, or 10 nucleotides from the nucleotide sequence of SEQ ID NO: 170. In particular embodiments, the guide RNA of the composition comprises a first nucleic acid sequence comprising any one of SEQ ID NOs: 36-63, 198, 199-232 and 329, and a second nucleic acid sequence comprising SEQ ID NO: 170. In some embodiments, the guide RNA comprises a first nucleic acid sequence comprising SEQ ID NO: 209 and a second nucleic acid sequence comprising SEQ ID NO: 170. In some embodiments, the guide RNA comprises a first nucleic acid sequence comprising SEQ ID NO: 36 and a second nucleic acid sequence comprising SEQ ID NO: 170. The guide RNA may comprise a first sequence comprising SEQ ID NO: 199 and a second sequence comprising SEQ ID NO: 170. The guide RNA may comprise a first nucleic acid sequence of SEQ ID NO: 217 and a second nucleic acid sequence comprising SEQ ID NO: 170.

[0427] In the muation-correction approach, exemplary guide sequences for targeting a base editor (e.g., ABE or CBE) to an USH2A gene are provided in Tables 4-6 of Example 2 and either of the sequences shown in FIG. 8B. A guide sequence designed for the mutation-correction approach of USH2A base editing may comprise any of the sequences of SEQ ID NOs: 1-35 (as a protospacer).

[0428] In the mutation-correction approach, in some embodiments, a guide sequence is is designed to target the C100, G802, C1000, C1876, C2209, C2440, C2755, C2797, C3883, C4645, C4957, G5581, C8167, C9874, C9815, C10712, G11864, G12575, C13010, C13274, C13316, C13822, C14803, or C15017 position in USH2A. In particular embodiments, a guide sequence is designed to target the C100, G11864, G12575, C13274, or C14803 position in USH2A. In some embodiments, a guide sequence is designed to target and correct a G802A, a C1000T, a C1876T, a C2209T, a C2440T, a C2755T, a C2797T, a C3883T, a C4645T, a C4957T, a G5581A, a C8167T, a C9874T, a C9815T, a C10712T, a G11864A, a G12575A, a C13010T, a C13274T, a C13316T, a C13822T, a C14803T, or a C15017T mutation. In some embodiments, provided herein are complexes for adenine base editing that comprise i) any of the disclosed ABEs and ii) one or more of the aforementioned guide sequences. In some embodiments, the administration of any one of these complexes to a subject introduces a point mutation that generates a stop codon, eliminates a stop codon, or alters the regulatory sequence of a gene (e.g., a gene promotor or gene repressor). Particular adenine base editor-gRNA protospacer combinations that are particularly suitable for introducing these mutations are described in Table 5.

[0429] Also in the mutation-correction approach, in some embodiments, in some embodiments, a guide sequence is designed to target the T1606, A1841, T2296, A3368, T4325, A7595, A8559, T9799, T10561, or A12067 position in USH2A. In some embodiments, a guide sequence is designed to target and correct a T1606C, an A1841G, a T2296C, an A3368G, a T4325C, an A7595G, an A8559G, a T9799C, a T10561C, or an A12067G mutation. In some embodiments, provided herein are complexes for cytosine base editing that comprise i) any of the disclosed CBEs, and ii) one or more of the aforementioned guide sequences. In some embodiments, the administration of any one of these complexes to a subject introduces a point mutation that generates a stop codon, eleminates a stop codon, or alters the regulatory sequence of a gene (e.g., a gene promotor or gene repressor). Particular cytidine base editor-gRNA protospacer combinations that are particularly suitable for introducing these mutations are described in Table 4.

[0430] In the exon-skipping approach, in some embodiments, a guide sequence is designed to target any of the splice acceptor site (SAS) or splice donor site (SDS) positions (or loci) in USH2A shown in Table 6 herein. In particular embodiments, a guide sequence is designed to target the C.2168-2A or C.2168-1G (exon 13) or C.3158-2A or C.3158-1G (exon 16) position in USH2A. In some embodiments, provided herein are complexes for adenine base editing that comprise i) any of the disclosed ABEs, and ii) one or more of the aforementioned guide sequences. In some embodiments, provided herein are complexes for cytidine base editing that comprise i) any of the disclosed CBEs, and ii) one or more of the aforementioned guide sequences. In some embodiments, the administration of any one of these complexes to a subject disrupts a SAS or an SDS of the gene, such as the SAS or SDS of exon 13 or exon 16.

[0431] The disclosure contemplates guide sequences that have complementarity to one or more portions of the USH2A gene. It should be appreciated that guide sequences may be engineered that are complementary (e.g., 100% complementary) to any of the exemplary portions of the USH2A gene. In some embodiments, a guide sequence is designed to have complementarity to a target sequence in the USH2A gene that has any of the following mutations: G802A, a C1000T, a C1876T, a C2209T, a C2440T, a C2755T, a C2797T, a C3883T, a C4645T, a C4957T, a G5581A, a C8167T, a C9874T, a C9815T, a C10712T, a G11864A, a G12575A, a C13010T, a C13274T, a C13316T, a C13822T, a C14803T, or a C15017T, T1606C, an A1841G, a T2296C, an A3368G, a T4325C, an A7595G, an A8559G, a T9799C, a T10561C, or an A12067G mutation. The USH2A exons and editing windows associated with each of these mutations are located may be found in FIGS. 3A and 3B.

[0432] In some embodiments, a guide sequence is designed to have complementarity to a target sequence in the USH2A gene to any of the splice acceptor sites or splice donor sites in the USH2A gene, e.g., any of the splice acceptor sites or splice donor sites listed in Table 6 of Example 2, below. In particular embodiments, a a guide sequence is designed to have complementarity to a target sequence in the USH2A gene that comprises any of the following splice site loci: C.2168-2A or C.2168-1G (exon 13) or C.3158-2A or C.3158-1G (exon 16) position. In some embodiments, a guide sequence is designed to have complementarity to any of the splice acceptor sites or splice donor sites associated with exon 8, exon 13, exon 16, exon 17, exon 18, exon 21, exon 24, exon 25, exon 28, exon 29, exon 30, exon 31, exon 32, exon 38, exon 43, exon 45, exon 50, exon 53, exon 56, exon 59, exon 62, exon 65, exon 68, exon 69, and exon 71. The precise mutations being introduced in this approach are listed in Table 6 of Example 2. In particular embodiments, a guide sequence is designed to have complementarity to any of the splice acceptor sites or splice donor sites associated with exon 13, exon 16, exon 59, or exon 43. In other embodiments, a guide sequence is designed to have complementarity to any of the splice acceptor sites or splice donor sites associated with exon 17, exon 28, exon 53, or exon 62.

[0433] In some embodiments, a guide sequence is selected to reduce the degree of secondary structure within the guide sequence. Secondary structure may be determined by any suitable polynucleotide folding algorithm. Some programs are based on calculating the minimal Gibbs free energy. An example of one such algorithm is mFold, as described by Zuker and Stiegler (Nucleic Acids Res. 9 (1981), 133-148). Another example folding algorithm is the online webserver RNAfold, developed at Institute for Theoretical Chemistry at the University of Vienna, using the centroid structure prediction algorithm (see e.g. A. R. Gruber et al., 2008, Cell 106(1): 23-24; and PA Carr and GM Church, 2009, Nature Biotechnology 27(12): 1151-62). Further algorithms may be found in U.S. application Ser. No. 61/836,080; Broad Reference BI-2013/004A); incorporated herein by reference.

[0434] In general, a tracr mate sequence includes any sequence that has sufficient complementarity with a tracr sequence to promote one or more of: (1) excision of a guide sequence flanked by tracr mate sequences in a cell containing the corresponding tracr sequence; and (2) formation of a complex at a target sequence, wherein the complex comprises the tracr mate sequence hybridized to the tracr sequence. In general, degree of complementarity is with reference to the optimal alignment of the tracr mate sequence and tracr sequence, along the length of the shorter of the two sequences. Optimal alignment may be determined by any suitable alignment algorithm, and may further account for secondary structures, such as self-complementarity within either the tracr sequence or tracr mate sequence. In some embodiments, the degree of complementarity between the tracr sequence and tracr mate sequence along the length of the shorter of the two when optimally aligned is about or more than about 25%, 30%, 40%, 50%, 60%, 70%, 80%, 90%, 95%, 97.5%, 99%, or higher. In some embodiments, the tracr sequence is about or more than about 5, 6, 7, 8, 9, 10, 11, 12, 13, 14, 15, 16, 17, 18, 19, 20, 25, 30, 40, 50, or more nucleotides in length. In some embodiments, the tracr sequence and tracr mate sequence are contained within a single transcript, such that hybridization between the two produces a transcript having a secondary structure, such as a hairpin. Preferred loop forming sequences for use in hairpin structures are four nucleotides in length, and most preferably have the sequence GAAA. However, longer or shorter loop sequences may be used, as may alternative sequences. The sequences preferably include a nucleotide triplet (for example, AAA), and an additional nucleotide (for example C or G). Examples of loop forming sequences include CAAA and AAAG. In an embodiment of the invention, the transcript or transcribed polynucleotide sequence has at least two or more hairpins. In preferred embodiments, the transcript has two, three, four or five hairpins. In a further embodiment of the invention, the transcript has at most five hairpins. In some embodiments, the single transcript further includes a transcription termination sequence; preferably this is a polyT sequence, for example six T nucleotides. Further non-limiting examples of single polynucleotides comprising a guide sequence, a tracr mate sequence, and a tracr sequence are as follows (listed 5′ to 3′), where “N” represents a base of a guide sequence, the first block of lower case letters represent the tracr mate sequence, and the second block of lower case letters represent the tracr sequence, and the final poly-T sequence represents the transcription terminator: (1) NNNNNNNNgtttttgtactctcaagatttaGAAAtaaatcttgcagaagctacaaagataaggctt catgccgaaatcaacaccctgtcattttatggcagggtgttttcgttatttaaTTTTTT (SEQ ID NO: 553); (2) NNNNNNNNNNNNNNNNNNgtttttgtactctcaGAAAtgcagaagctacaaagataaggcttcatgccgaaatca acaccctgtcattttatggcagggtgttttcgttatttaaTTTTTT (SEQ ID NO: 554); (3) NNNNNNNNNNNNNNNNNNNNgtttttgtactctcaGAAAtgcagaagctacaaagataaggcttcatgccgaa atca acaccctgtcattttatggcagggtgtTTTTT (SEQ ID NO: 555); (4) NNNNNNNNNNNNNNNNNNNNgttttagagctaGAAAtagcaagttaaaataaggctagtccgttatcaacttga aaa agtggcaccgagtcggtgcTTTTTT (SEQ ID NO: 556); (5) NNNNNNNNNNNNNNNNNNNNgttttagagctaGAAATAGcaagttaaaataaggctagtccgttatcaactt gaa aaagtgTTTTTTT (SEQ ID NO: 557); and (6) NNNNNNNNNNNNNNNNNNNNgttttagagctagAAATAGcaagttaaaataaggctagtccgttatcaTTT TT TTT (SEQ ID NO: 558). In some embodiments, sequences (1) to (3) are used in combination with Cas9 from S. thermophilus CRISPR. In some embodiments, sequences (4) to (6) are used in combination with Cas9 from S. pyogenes. In some embodiments, the tracr sequence is a separate transcript from a transcript comprising the tracr mate sequence.

[0435] It will be apparent to those of skill in the art that in order to target any of the base editors comprising a Cas9 domain and a deaminase, as disclosed herein, to a target site in USH2A to be edited, it is typically necessary to co-express the base editor together with a guide RNA, e.g., an sgRNA. As explained in more detail elsewhere herein, a guide RNA typically comprises a tracrRNA framework allowing for Cas9 binding, and a guide sequence, which confers sequence specificity to the Cas9:nucleic acid editing enzyme/domain base editor.

[0436] Certain exemplary guide sequences to target USH2A may comprise any of the following guide sequences (spacers). Exemplary guide sequences to target USH2A may comprise any of the guide sequences set forth as SEQ ID NOs: 199-232 and 329.

(SEQ ID NO: 199)
5′-CUCUUACCUUGGGAAAGGAG-3′,
(SEQ ID NO: 200)
5′-UUCCUUCCCGCAUCAGGGAA-3′,
(SEQ ID NO: 214)
5′-UUCCCCGUAAGAAAAUUAAC-3′,
(SEQ ID NO: 201)
5′-AUCCAAAGCAAAAGACAAGC-3′,
(SEQ ID NO: 209)
5′-GUAGUCAUUAACACAAACUC-3′,
(SEQ ID NO: 213)
5′-GCUCAGUACUGAGGCACUGU-3′,
(SEQ ID NO: 215)
5′-UUCAAAAGCUGGCCUUAAUG-3′,
(SEQ ID NO: 216)
5′-AGACCUCAUGACUCAGUCAA-3′,
(SEQ ID NO: 36)
5′-GCUUUAGGGCUUAGGUGUGAU-3′,
(SEQ ID NO: 37)
5′-GGAGCUAAAUUACAAUGAAG-3′,
and
(SEQ ID NO: 217)
5′-CCAUUCAUGCAGGCUACAAG-3′.

[0437] In some embodiments, the gRNA comprises a protospacer sequence that comprises any of the nucleic acid sequences as set forth in SEQ ID NOs: 1-35. The protospacer sequence has the same nucleotide sequence as the spacer sequence of the guide RNA, except the spacer sequence comprises ribonucleotides (e.g., uracils), and the protospacer sequence comprises deoxyribonucleotides (e.g., thymines).

[0438] In some embodiments, the guide sequence comprises the nucleotide sequence of any one of SEQ ID NOs: 1-63 and 92-94, absent the first 1, 2, 3, 4, 5, 6, 7, 8, 9, or 10 nucleic acid residues from the 5′ end. It should be appreciated that any of the 5′ truncated guide sequences provided herein may further comprise a G residue at the 5′ end. In some embodiments, the guide sequence comprises the amino acid sequence of any one of SEQ ID NOs: 1-63 and 92-94, absent the first 1, 2, 3, 4, 5, 6, 7, 8, 9, 10, 11, or 12 nucleic acid residues from the 3′ end.

[0439] The disclosure also provides guide sequences that are longer variants of any of the guide sequences provided herein (e.g., SEQ ID NOs: 36-63, 198, 199-232, and 329). In some embodiments, the guide sequence comprises one additional residue that is 5′-U-3′ at the 3′ end of any one of SEQ ID NOs: 36-63, 198-232, and 329. In some embodiments, the guide sequence comprises two additional residues that are 5′-UG-3′ at the 3′ end of any one of SEQ ID NOs: 36-63, 198-232, and 329. In some embodiments, the guide sequence comprises three additional residues that are 5′-UGG-3′ at the 3′ end of any one of SEQ ID NOs: 36-63, 198-232, and 329. In some embodiments, the guide sequence comprises four additional residues that are 5′-UGGG-3′ at the 3′ end of any one of SEQ ID NOs: 36-63, 198-232, and 329. In some embodiments, the guide sequence comprises five additional residues that are 5′-UGGGA-3′ at the 3′ end of any one of SEQ ID NOs: 1-63 and 92-94. In some embodiments, the guide sequence comprises six additional residues that are 5′-UGGGAA-3′ at the 3′ end of any one of SEQ ID NOs: 36-63, 198-232, and 329. In some embodiments, the guide sequence comprises seven additional residues that are 5′-UGGGAAG-3′ at the 3′ end of any one of SEQ ID NOs: 36-63, 198-232, and 329. In some embodiments, the guide sequence comprises eight additional residues that are 5′-UGGGAAGA-3′ at the 3′ end of any one of SEQ ID NOs: 36-63, 198-232, and 329. In some embodiments, the guide sequence comprises nine additional residues that are 5′-UGGGAAGAA-3′ at the 3′ end of any one of SEQ ID NOs: 36-63, 198-232, and 329.

[0440] In some embodiments, the guide RNAs for use in accordance with the disclosed methods of editing comprise synthetic single guide RNAs (sgRNAs) containing modified ribonucleotides. In some embodiments, the guide RNAs contain modifications such as 2′-O-methylated nucleotides and phosphorothioate linkages. In some embodiments, the guide RNAs contain 2′-0-methyl modifications in the first three and last three nucleotides, and phosphorothioate bonds between the first three and last three nucleotides. Exemplary modified synthetic sgRNAs are disclosed in Hendel A. et al., Nat. Biotechnol. 33, 985-989 (2015), herein incorporated by reference.

[0441] The sequences of suitable guide RNAs for targeting the disclosed ABEs to specific genomic target sites will be apparent to those of skill in the art based on the present disclosure. Such suitable guide RNA sequences typically comprise guide sequences that are complementary to a nucleic sequence within 50 nucleotides upstream or downstream of the target nucleobase pair to be edited. Some exemplary guide RNA sequences suitable for targeting any of the provided ABEs to specific target sequences are provided herein. Additional guide sequences are are well known in the art and may be used with the base editors described herein. Additional exemplary guide sequences are disclosed in, for example, Jinek M., et al., Science 337:816-821(2012); Mali P, Esvelt K M & Church G M (2013) Cas9 as a versatile tool for engineering biology, Nature Methods, 10, 957-963; Li J F et al., (2013) Multiplex and homologous recombination-mediated genome editing in Arabidopsis and Nicotiana benthamiana using guide RNA and Cas9, Nature Biotechnology, 31, 688-691; Hwang, W. Y. et al., Efficient genome editing in zebrafish using a CRISPR-Cas system, Nature Biotechnology 31, 227-229 (2013); Cong L et al., (2013) Multiplex genome engineering using CRIPSR/Cas systems, Science, 339, 819-823; Cho S W et al., (2013) Targeted genome engineering in human cells with the Cas9 RNA-guided endonuclease, Nature Biotechnology, 31, 230-232; Jinek, M. et al., RNA-programmed genome editing in human cells, eLife 2, e00471 (2013); Dicarlo, J. E. et al., Genome engineering in Saccharomyces cerevisiae using CRISPR-Cas systems. Nucleic Acid Res. (2013); Briner A E et al., (2014) Guide RNA functional modules direct Cas9 activity and orthogonality, Mol Cell, 56, 333-339, the entire contents of each of which are incorporated herein by reference.

[0442] BE/gRNA Complexes

[0443] Some aspects of this disclosure provide complexes comprising any of the base editors (e.g., base editor) provided herein, for example any of the adenosine base editors described herein, and a guide nucleic acid bound to napDNAbp of the base editor. In some embodiments, the guide nucleic acid is any one of the guide RNAs provided herein. In some embodiments, the disclosure provides any of the base editors (e.g., cytosine base editors or adenosine base editors) provided herein bound to any of the guide RNAs provided herein. In some embodiments, the napDNAbp of the base editor is a Cas9 domain (e.g., a dCas9, a nuclease active Cas9, or a Cas9 nickase), which is bound to a guide RNA. In some embodiments, the complexes provided herein are configured to generate a mutation in a nucleic acid, for example to change an amino acid in a gene (e.g., USH2A) to change the properties of one or more proteins (e.g., Usherin).

[0444] In some embodiments, the guide RNA comprises a guide sequence that comprises at least 8, 9, 10, 11, 12, 13, 14, 15, 16, 17, 18, 19, 20, 21, 22, 23, 24, 25, 26, 27, 28, 29, or 30 contiguous nucleic acids that are 100% complementary to a target sequence, for example a target DNA sequence. In some embodiments, the guide RNA comprises a guide sequence that comprises at least 10, 11, 12, 13, 14, 15, 16, 17, 18, 19, 20, 21, 22, 23, 24, or 25 contiguous nucleic acids that are 100% complementary to a DNA sequence in a USH2A gene, for example, a region of a human USH2A gene.

[0445] In some embodiments, any of the complexes provided herein comprise a gRNA having a guide sequence that comprises at least 8, 9, 10, 11, 12, 13, 14, 15, 16, 17, 18, 19, 20, 21, 22, 23, 24, 25, 26, 27, 28, 29, or 30 contiguous nucleic acids that are 100% complementary to any one of the nucleic acid sequences provided herein, e.g., the nucleic acid sequences of SEQ ID NOs: 36-63, 198-232, and 329. It should be appreciated that the guide sequence of the gRNA may comprise one or more nucleotides that are not complementary to a target sequence. In some embodiments, the guide sequence of the gRNA is at the 5′ end of the gRNA. In some embodiments, the guide sequence of the gRNA further comprises a G at the 5′ end of the gRNA. In some embodiments, the G at the 5′ end of the gRNA is not complementary with the target sequence. In some embodiments, the guide sequence of the gRNA comprises 1, 2, 3, 4, 5, 6, 7, or 8 nucleotides that are not complementary to a target sequence. In some embodiments, the guide RNA comprises a guide sequence that comprises at least 8, 9, 10, 11, 12, 13, 14, 15, 16, 17, 18, 19, 20, 21, 22, 23, 24, 25, 26, 27, 28, 29, or 30 contiguous nucleic acids that are 100% complementary to a target sequence, for example a target DNA sequence in a USH2A gene. In some embodiments, the guide RNA comprises a guide sequence that comprises at least 10, 11, 12, 13, 14, 15, 16, 17, 18, 19, 20, 21, 22, 23, 24, or 25 contiguous nucleic acids that are 100% complementary to a DNA sequence in a human USH2A gene. In some embodiments, the USH2A gene is a human, chimpanzee, ape, monkey, dog, mouse, or rat USH2A gene. In some embodiments, the USH2A gene is a human USH2A gene.

[0446] The present disclosure contemplates the use of any of the guide RNA sequences comprising any of the nucleic acid sequences listed in Tables 7-9 (e.g., SEQ ID NOs: 36-63, 198-232, and 329) in association with any of the disclosed base editors (e.g., the base editors of SEQ ID NOs: 350-388). The present disclosure also contemplates the use of any of the guide RNA sequences comprising any of the protospacer nucleic acid sequences listed in Tables 4 and 5 (e.g., SEQ ID NOs: 1-35) in association with any of the disclosed base editors (e.g., the base editors of SEQ ID NOs: 350-388).

[0447] In particular embodiments, the disclosure provides complexes comprising (i) an cytidine base editor, and (ii) a guide RNA (gRNA) comprising a nucleic acid sequence that is at least 90%, at least 95%, at least 98%, or at least 99% identical to any one of SEQ ID NOs: 1-11, 37-45, 48, 49, 51, 52, 54, 55, 58-63, 93, and 198-209. The cytidine base editor may comprise any one of SEQ ID NOs: 350-372, or a variant thereof. Any cytidine base editor in the art is contemplated for use in the complexes of the disclosure. In particular embodiments, the cytidine base editor is BE4max or BE4max-VRQR.

[0448] The guide RNA of the disclosed complexes may comprise a nucleic acid sequence selected from the group consisting of SEQ ID NOs: 1-11, 37-45, 48, 49, 51, 52, 54, 55, 58-63, 93, and 198-209. In some embodiments, the guide RNA comprises a nucleic acid sequence that is at least 90%, at least 95%, at least 98%, or at least 99% identical to any one of SEQ ID NOs: 199, 200, 205, 37, 40, and 44. In some embodiments, the gRNA comprises a nucleic acid sequence selected from the group consisting of SEQ ID NOs: 199, 200, 205, 37, 40, and 44. In some embodiments, the complex comprises a base editor selected from BE3, BE3.9max, BE4max, BE4-SaKKH, BE3.9-NG, BE3.9-NRRH, or BE4max-VRQR. In particular embodiments, the complex comprises BE4max and a gRNA that comprises the nucleic acid sequence of SEQ ID NO: 199. In other embodiments, the cytidine base editor is BE4max, and the gRNA comprises the nucleic acid sequence of SEQ ID NO: 40. The complex may comprise a cytidine base editor that comprises BE4max and a gRNA that comprises a first nucleic acid sequence of SEQ ID NO: 199 and a second nucleic acid sequence comprising SEQ ID NO: 170.

[0449] In other embodiments, the disclosure provides complexes comprising (i) an adenosine base editor, and (ii) a guide RNA (gRNA) comprises a nucleic acid sequence that is at least 90%, at least 95%, at least 98%, or at least 99% identical to any one of SEQ ID NOs: 12-36, 46, 47, 50, 53, 56, 57, 93, 209-213, 215-232, and 329. The guide RNA of the complexes may comprise a nucleic acid sequence selected from the group consisting of SEQ ID NOs: 12-36, 46, 47, 50, 53, 56, 57, 93, 209-213, 215-232, and 329. The adenine base editor may comprise any one of SEQ ID NOs: 373-388, or a variant thereof. Any adenine base editor in the art is contemplated for use in the complexes of the disclosure. In some embodiments, the adenine base editor is ABE7.10, ABE8e, ABE8e-SaKKH, ABE8e-NG, ABE-xCas9, ABE7.10-SaKKH, ABE7.10-NG, ABE7.10-VRQR, ABE8e-NRTH, ABE8e-NRRH, or ABE8e-VRQR. In particular embodiments, the adenine base editor is ABE8e.

[0450] In some embodiments, the guide RNA of the complex comprises a protospacer that comprises a nucleic acid sequence that is at least 90%, at least 95%, at least 98%, or at least 99% identical to any one of SEQ ID NOs: 209, 213, 216, 217, 36, and 47. In some embodiments, the guide RNA of the complex comprises a protospacer that comprises the nucleic acid sequence of any one of SEQ ID NOs: 209, 213, 216, 217, 36, and 47. In particular embodiments, the complex comprises an adenine base editor that comprises ABE8e, and a guide RNA that comprises a first nucleic acid sequence of SEQ ID NO: 217 and a second nucleic acid sequence comprising SEQ ID NO: 170. The complex may comprise ABE8e-VRQR and a guide RNA comprising a first nucleic acid sequence of SEQ ID NO: 209 and a second nucleic acid sequence comprising SEQ ID NO: 170.

[0451] Any of the above-disclosed complexes may be comprised within a pharmaceutical composition, a host cell, one or more vectors, and one ore more rAAV vectors.

### Editing Methods

[0452] Some aspects of this disclosure provide methods of using the base editors, or complexes comprising a guide nucleic acid (e.g., gRNA) and a base editor described herein. For example, some aspects of this disclosure provide methods comprising contacting a DNA, or RNA molecule with any of the base editors described herein, and with at least one guide nucleic acid (e.g., guide RNA), wherein the guide nucleic acid, (e.g., guide RNA) is comprises a sequence (e.g., a guide sequence that binds to a DNA target sequence) of at least 10 (e.g., at least 10, 15, 20, 25, or 30) contiguous nucleotides that is 100% complementary to a target sequence (e.g., any of the target USH2A sequences provided herein). In some embodiments, the 3′ end of the target sequence is immediately adjacent to a canonical PAM sequence (NGG). In some embodiments, the 3′ end of the target sequence is not immediately adjacent to a canonical PAM sequence (NGG). In some embodiments, the 3′ end of the target sequence is immediately adjacent to an AGC, GAG, TTT, GTG, or CAA sequence.

[0453] Some aspects of the disclosure provide methods of using base editors (e.g., any of the base editors described herein) and gRNAs to change a residue in a USH2A gene. In some embodiments, the disclosure provides methods of using base editors (e.g., any of the base editors described herein) and gRNAs to generate an A to G and/or T to C mutation in an USH2A gene, thereby resulting in a non-functional Usherin protein. In some embodiments, the disclosure provides method for deaminating an adenosine nucleobase (A) in an USH2A gene, the method comprising contacting the USH2A gene with a base editor and a guide RNA bound to the base editor, where the guide RNA comprises a guide sequence that is complementary to a target nucleic acid sequence in the USH2A gene.

[0454] In some embodiments, the USH2A gene comprises a C to T or G to A mutation. In some embodiments, the C to T or G to A mutation in the USH2A gene impairs function of the Usherin protein encoded by the USH2A gene. In particular, the mutated Usherin protein may be truncated and/or non-functional. In some embodiments of the disclosed editing methods, deaminating a mutant adenosine (A) nucleobase, or deaminating the A nucleobase complementary to the mutant thymine (T) nucleobase, corrects the C to T or G to A mutation in the USH2A gene. In some embodiments, correction of the C to T or G to A mutation in the USH2A gene leads to an amino acid substitution in the Usherin protein encoded by the USH2A gene. Exemplary amino acid substitutions in the USH2A protein that the presently disclosed adenine base editing methods aim to correct, along with their associated pathogenicities, are presented in Table 5 and FIGS. 3A and 3B.

[0455] In other embodiments, the USH2A gene comprises a T to C or A to G mutation. In some embodiments, the T to C or A to G mutation in the USH2A gene impairs function of the Usherin protein encoded by the USH2A gene. In particular, the mutated Usherin protein may be truncated and/or non-functional. In some embodiments of the disclosed editing methods, deaminating a mutant cytosine (C) nucleobase, or deaminating a C nucleobase complementary to the mutant guanine (G) nucleobase, corrects the T to C or A to G mutation in the USH2A gene. In some embodiments, correction of the T to C or A to G mutation in the USH2A gene leads to an amino acid substitution in the Usherin protein encoded by the USH2A gene. Exemplary amino acid substitutions in the USH2A protein that the presently disclosed cytidine base editing methods aim to correct, along with their associated pathogenicities, are presented in Table 4 and FIGS. 3A and 3B .

[0456] In some embodiments, the USH2A gene comprises a (wild-type) T or A nucleobase at a splice acceptor site or a splice donor site. In some embodiments of the disclosed editing methods, deaminating the adenosine (A) nucleobase, or deaminating the A nucleobase complementary to the thymine (T) nucleobase, induces exon skipping that restores (partially or completely) a functional Usherin protein. In other embodiments, the USH2A gene comprises a (wild-type) C or G nucleobase at a splice acceptor site or a splice donor site. In some embodiments of the disclosed editing methods, deaminating the cytosine (C) nucleobase, or deaminating a C nucleobase complementary to the guanine (G) nucleobase, in the deamination of a cytidine nucleobase in the USH2A gene that induces exon skipping that restores (partially or completely) a functional Usherin protein.

[0457] In some embodiments, the guide sequence of the gRNA comprises at least 8, 9, 10, 11, 12, 13, 14, 15, 16, 17, 18, 19, 20, 21, 22, 23, 24, 25, 26, 27, 28, 29, 30, 31, 32, 33, 34, or 35 contiguous nucleic acids that are 100% complementary to a target nucleic acid sequence of the USH2A gene. In some embodiments, the base editor nicks the target sequence that is complementary to the guide sequence.

[0458] In some embodiments, the target DNA sequence comprises a sequence associated with a USH2A pathway disease or disorder, e.g., Usher syndrome or arRP. In some embodiments, the target DNA sequence comprises a point mutation associated with a specific amino acid of USH2A. In some embodiments, the activity of the base editor (e.g., comprising an adenosine deaminase and a Cas9 domain), or the complex, results in a non-functional Usherin protein. In some embodiments, the target DNA sequence encodes a protein, and the point mutation is in a codon and results in a change in the amino acid encoded by the mutant codon as compared to the wild-type codon. In some embodiments, the deamination of the mutant A results in a change of the amino acid encoded by the mutant codon. In some embodiments, the deamination of the mutant A results in the codon encoding the mutant amino acid. In some embodiments, the contacting is in vivo in a subject. In some embodiments, the subject has or has been diagnosed with Usher syndrome.

[0459] Some embodiments provide methods for using the DNA editing base editors described herein. In some embodiments, the base editor is used to introduce a point mutation into a nucleic acid by deaminating a target nucleobase, e.g., an A residue.

[0460] The present disclosure provides methods for the treatment of a subject diagnosed with a disease associated with USH2A that can be corrected by a DNA editing base editor described herein. For example, in some embodiments, a method is provided that comprises administering to a subject having such a disease, e.g., Usher syndrome or arRP.

[0461] In some embodiments, a base editor recognizes canonical PAMs and therefore can correct the pathogenic G to A or C to T mutations with canonical PAMs, e.g., NGG, respectively, in the flanking sequences. For example, Cas9 proteins that recognize canonical PAMs comprise an amino acid sequence that is at least 80%, 85%, 90%, 95%, 97%, 98%, or 99% identical to the amino acid sequence of Streptococcus pyogenes Cas9 as provided by any one of SEQ ID NOs: 74, 77, and 79, or to a fragment thereof comprising the RuvC and HNH domains of any one of SEQ ID NO: 74, 102, and 107.

[0462] Some aspects of the disclosure provide methods for editing a nucleic acid. In some embodiments, the method is a method for editing a nucleobase of a nucleic acid (e.g., a base pair of a double-stranded DNA sequence). In some embodiments, the method comprises the steps of: a) contacting a target region of a nucleic acid (e.g., a double-stranded DNA sequence) with a complex comprising a base editor (e.g., a Cas9 domain fused to an adenosine deaminase) and a guide nucleic acid (e.g., gRNA), wherein the target region comprises a targeted nucleobase pair, b) inducing strand separation of said target region, c) converting a first nucleobase of said target nucleobase pair in a single strand of the target region to a second nucleobase, and d) cutting no more than one strand of said target region, where a third nucleobase complementary to the first nucleobase base is replaced by a fourth nucleobase complementary to the second nucleobase. In some embodiments, the method results in less than 20% indel formation in the nucleic acid. It should be appreciated that in some embodiments, step b is omitted. In some embodiments, the first nucleobase is an adenine. In some embodiments, the second nucleobase is a deaminated adenine, or inosine. In some embodiments, the third nucleobase is a thymine. In some embodiments, the fourth nucleobase is a cytosine. In some embodiments, the method results in less than 19%, 18%, 16%, 14%, 12%, 10%, 8%, 6%, 4%, 2%, 1%, 0.5%, 0.2%, or less than 0.1% indel formation. In some embodiments, the method further comprises replacing the second nucleobase with a fifth nucleobase that is complementary to the fourth nucleobase, thereby generating an intended edited base pair (e.g., A:T to G:C). In some embodiments, the fifth nucleobase is a guanine. In some embodiments, at least 5% of the intended base pairs are edited. In some embodiments, at least 10%, 15%, 20%, 25%, 30%, 35%, 40%, 45%, or 50% of the intended base pairs are edited.

[0463] In some embodiments, the ratio of intended products to unintended products in the target nucleotide is at least 2:1, 5:1, 10:1, 20:1, 30:1, 40:1, 50:1, 60:1, 70:1, 80:1, 90:1, 100:1, or 200:1, or more. In some embodiments, the ratio of intended point mutation to indel formation is greater than 1:1, 10:1, 50:1, 100:1, 500:1, or 1000:1, or more. In some embodiments, the cut single strand (nicked strand) is hybridized to the guide nucleic acid. In some embodiments, the cut single strand is opposite to the strand comprising the first nucleobase. In some embodiments, the base editor comprises a Cas9 domain. In some embodiments, the first base is adenine, and the second base is not a G, C, A, or T. In some embodiments, the second base is inosine. In some embodiments, the first base is adenine. In some embodiments, the second base is not a G, C, A, or T. In some embodiments, the second base is inosine. In some embodiments, the base editor inhibits base excision repair of the edited strand. In some embodiments, the base editor protects or binds the non-edited strand. In some embodiments, the base editor comprises UGI activity. In some embodiments, the base editor comprises a catalytically inactive inosine-specific nuclease. In some embodiments, the base editor comprises nickase activity. In some embodiments, the intended edited base pair is upstream of a PAM site. In some embodiments, the intended edited base pair is 1, 2, 3, 4, 5, 6, 7, 8, 9, 10, 11, 12, 13, 14, 15, 16, 17, 18, 19, or 20 nucleotides upstream of the PAM site. In some embodiments, the intended edited base pair is downstream of a PAM site. In some embodiments, the intended edited base pair is 1, 2, 3, 4, 5, 6, 7, 8, 9, 10, 11, 12, 13, 14, 15, 16, 17, 18, 19, or 20 nucleotides downstream stream of the PAM site. In some embodiments, the method does not require a canonical (e.g., NGG) PAM site. In some embodiments, the base editor comprises a linker. In some embodiments, the linker is 1-25 amino acids in length. In some embodiments, the linker is 5-20 amino acids in length. In some embodiments, linker is 10, 11, 12, 13, 14, 15, 16, 17, 18, 19, or 20 amino acids in length. In some embodiments, the target region comprises a target window, wherein the target window comprises the target nucleobase pair. In some embodiments, the target window comprises 1-10 nucleotides. In some embodiments, the target window is 1-9, 1-8, 1-7, 1-6, 1-5, 1-4, 1-3, 1-2, or 1 nucleotides in length. In some embodiments, the target window is 1, 2, 3, 4, 5, 6, 7, 8, 9, 10, 11, 12, 13, 14, 15, 16, 17, 18, 19, or 20 nucleotides in length. In some embodiments, the intended edited base pair is within the target window. In some embodiments, the target window comprises the intended edited base pair. In some embodiments, the method is performed using any of the base editors described herein. In some embodiments, a target window is a deamination window.

[0464] In some embodiments, the disclosure provides methods for editing a nucleotide. In some embodiments, the disclosure provides a method for editing a nucleobase pair of a double-stranded DNA sequence. In some embodiments, the method comprises a) contacting a target region of the double-stranded DNA sequence with a complex comprising a base editor and a guide nucleic acid (e.g., gRNA), where the target region comprises a target nucleobase pair, b) inducing strand separation of said target region, c) converting a first nucleobase of said target nucleobase pair in a single strand of the target region to a second nucleobase, d) cutting no more than one strand of said target region, wherein a third nucleobase complementary to the first nucleobase base is replaced by a fourth nucleobase complementary to the second nucleobase, and the second nucleobase is replaced with a fifth nucleobase that is complementary to the fourth nucleobase, thereby generating an intended edited base pair, wherein the efficiency of generating the intended edited base pair is at least 5%. It should be appreciated that in some embodiments, step b is omitted. In some embodiments, at least 5% of the intended base pairs are edited. In some embodiments, at least 10%, 15%, 20%, 25%, 30%, 35%, 40%, 45%, or 50% of the intended base pairs are edited. In some embodiments, the method causes less than 19%, 18%, 16%, 14%, 12%, 10%, 8%, 6%, 4%, 2%, 1%, 0.5%, 0.2%, or less than 0.1% indel formation. In some embodiments, the ratio of intended product to unintended products at the target nucleotide is at least 2:1, 5:1, 10:1, 20:1, 30:1, 40:1, 50:1, 60:1, 70:1, 80:1, 90:1, 100:1, or 200:1, or more. In some embodiments, the ratio of intended point mutation to indel formation is greater than 1:1, 10:1, 50:1, 100:1, 500:1, or 1000:1, or more. In some embodiments, the cut single strand is hybridized to the guide nucleic acid. In some embodiments, the cut single strand is opposite to the strand comprising the first nucleobase. In some embodiments, the first base is adenine. In some embodiments, the second nucleobase is not G, C, A, or T. In some embodiments, the second base is inosine. In some embodiments, the base editor inhibits base excision repair of the edited strand. In some embodiments, the base editor protects (e.g., form base excision repair) or binds the non-edited strand. In some embodiments, the base editor comprises UGI activity. In some embodiments, the base editor comprises a catalytically inactive inosine-specific nuclease. In some embodiments, the base editor comprises nickase activity. In some embodiments, the intended edited base pair is upstream of a PAM site. In some embodiments, the intended edited base pair is 1, 2, 3, 4, 5, 6, 7, 8, 9, 10, 11, 12, 13, 14, 15, 16, 17, 18, 19, or 20 nucleotides upstream of the PAM site. In some embodiments, the intended edited base pair is downstream of a PAM site. In some embodiments, the intended edited base pair is 1, 2, 3, 4, 5, 6, 7, 8, 9, 10, 11, 12, 13, 14, 15, 16, 17, 18, 19, or 20 nucleotides downstream stream of the PAM site. In some embodiments, the method does not require a canonical (e.g., NGG) PAM site. In some embodiments, the base editor comprises a linker. In some embodiments, the linker is 1-25 amino acids in length. In some embodiments, the linker is 5-20 amino acids in length. In some embodiments, the linker is 10, 11, 12, 13, 14, 15, 16, 17, 18, 19, or 20 amino acids in length. In some embodiments, the target region comprises a target window, wherein the target window comprises the target nucleobase pair. In some embodiments, the target window comprises 1-10 nucleotides. In some embodiments, the target window is 1-9, 1-8, 1-7, 1-6, 1-5, 1-4, 1-3, 1-2, or 1 nucleotides in length. In some embodiments, the target window is 1, 2, 3, 4, 5, 6, 7, 8, 9, 10, 11, 12, 13, 14, 15, 16, 17, 18, 19, or 20 nucleotides in length. In some embodiments, the intended edited base pair occurs within the target window. In some embodiments, the target window comprises the intended edited base pair. In some embodiments, the base editor is any one of the base editors described herein.

[0465] The present disclosure provides methods for the treatment of a subject diagnosed with a disease associated with USH2A, e.g., Usher syndrome or arRP. For example, in some embodiments, a method is provided that comprises administering to a subject having such a disease, e.g., Usher syndrome, type 2A, an effective amount of a complex comprising any of the the base editors and guide RNAs described herein.

[0466] Any of the complexes disclosed in the section above may be used in the mutation-correction approach. Particular complexes of base editors and guide RNA sequences that are useful for mutation-correction approach are listed in Tables 4 and 5. Particularly useful complexes of ABEs and guide RNA sequences are listed in Table 5, and particularly useful complexes of CBEs and guide RNA sequences are listed in Table 4. Any of the complexes comprising CBEs disclosed herein (e.g., the CBEs of SEQ ID NOs: 350-372) may be used to correct any of the following mutations: a T1606C, an A1841G, a T2296C, an A3368G, a T4325C, an A7595G, an A8559G, a T9799C, a T10561C, and an A12067G mutation.

[0467] In particular embodiments, methods of editing are provided wherein the guide RNA comprises a first nucleic acid sequence comprising SEQ ID NO: 199 and a second nucleic acid sequence comprising SEQ ID NO: 170, wherein the base editor is BE4max, and wherein the USH2A gene comprises an A7595G mutation. Any of the complexes comprising ABEs disclosed herein (e.g., the ABEs of SEQ ID NOs: 373-388) may be used to correct any of the following mutations: a G802A, a C1000T, a C1876T, a C2209T, a C2440T, a C2755T, a C2797T, a C3883T, a C4645T, a C4957T, a G5581A, a C8167T, a C9874T, a C9815T, a C10712T, a G11864A, a G12575A, a C13010T, a C13274T, a C13316T, a C13822T, a C14803T, and a C15017T mutation. In particular embodiments, methods of editing are provided wherein the guide RNA comprises a first nucleic acid sequence comprising SEQ ID NO: 209 and a second nucleic acid sequence comprising SEQ ID NO: 170, wherein the base editor is ABE8e, and wherein the USH2A gene comprises a G11864A mutation.

[0468] Any of the complexes disclosed in the section above may be used in the exon skipping approach, which involved disruption of a splice acceptor site or a splice donor site. Particular complexes of base editors and guide RNA sequences that are useful for exon skipping approach, along with particular SAS or SDS positions (or loci) in USH2A of interest shown in Table 6 herein. The base editor-gRNA combinations are listed in Table 6 next to the SAS or SDS positions for which these combinations are particularly useful for editing to induce exon skipping. (The exon associated with each SAS and SDS is also listed in Table 6.) Any of the complexes comprising CBEs disclosed herein (e.g., the CBEs of SEQ ID NOs: 350-372) may be used to disrupt a splice acceptor site or a splice donor site in the USH2A gene associated with exon 8, exon 13, exon 16, exon 17, exon 18, exon 21, exon 24, exon 28, exon 29, exon 30, exon 31, exon 32, exon 38, exon 43, exon 45, exon 50, exon 53, exon 56, exon 59, exon 62, exon 65, exon 68, exon 69, and exon 71. In particular embodiments, methods of editing are provided wherein the guide RNA comprises a first nucleic acid sequence comprising SEQ ID NO: 199 and a second nucleic acid sequence comprising SEQ ID NO: 170, wherein the base editor is BE4max, and wherein the USH2A gene comprises an A7595G mutation.

[0469] And any of the complexes comprising ABEs disclosed herein (e.g., the ABEs of SEQ ID NOs: 373-388) may be used to disrupt a splice acceptor site or a splice donor site associated with exon 13, exon 21, exon 25, exon 31, and exon 69. In particular embodiments, methods of editing are provided wherein the guide RNA comprises a first nucleic acid sequence comprising SEQ ID NO: 36 and a second nucleic acid sequence comprising SEQ ID NO: 170, wherein the base editor is an ABE8e, and wherein the step of contacting results in the disruption of a splice acceptor site or a splice donor site associated with exon 13.

### Base Editor Delivery

[0470] In some aspects, the present disclosure provides for the delivery of base editors in vitro and in vivo using various strategies, including on separate vectors using split inteins and as well as direct delivery strategies of the ribonucleoprotein complex (i.e., the base editor complexed to the gRNA and/or the second-site gRNA) using techniques such as electroporation, use of cationic lipid-mediated formulations, and induced endocytosis methods using receptor ligands fused to the ribonucleoprotein complexes. In addition, mRNA delivery methods may also be employed. Any such methods are contemplated herein.

[0471] Such methods may involve transducing (e.g., via transfection) cells with a plurality of complexes each comprising a base editor and a gRNA molecule. In some embodiments, the gRNA is bound to the napDNAbp domain (e.g., nCas9 domain) of the base editor. In some embodiments, each gRNA comprises a guide sequence of at least 10 contiguous nucleotides (e.g., 10, 11, 12, 13, 14, 15, 16, 17, 18, 19, 20, 21, 22, 23, 24, 25, 26, 27, 28, 29, or 30 contiguous nucleotides) that is complementary to a target sequence. In certain embodiments, the methods involve the transfection of nucleic acid constructs (e.g., plasmids and mRNA constructs) that each (or together) encode the components of a complex of base editor and gRNA molecule. In certain embodiments, any of the disclosed base editors and a gRNA are administered as a protein:RNA complex, such as a ribonucleoprotein complex. In some embodiments, any of the disclosed base editors are administered as an mRNA construct, along with the gRNA molecule. In particular embodiments, administration to cells is achieved by electroporation or lipofection.

[0472] In certain embodiments of the disclosed methods, a nucleic acid construct (e.g., a plasmid or an mRNA construct) that encodes the base editor (BE) is transfected into the cell separately from the nucleic acid construct that encodes the gRNA molecule. In certain embodiments, these components are encoded on a single construct and transfected together. In other embodiments, the methods disclosed herein involve the introduction into cells of a complex comprising a BE and a gRNA molecule that has been expressed and cloned outside of these cells.

[0473] It should be appreciated that any of the base editors described herein, may be introduced into the cell in any suitable way, either stably or transiently. In some embodiments, a base editor may be transfected into the cell. In some embodiments, the cell may be transduced or transfected with a nucleic acid construct that encodes a base editor. For example, a cell may be transduced (e.g., with a virus encoding a base editor) with a nucleic acid that encodes a base editor, or the translated base editor. As an additional example, a cell may be transfected with a nucleic acid (e.g., a plasmid) that encodes a base editor or the translated base editor. Such transductions or transfections may be stable or transient. In some embodiments, cells expressing a base editor or containing a base editor may be transduced or transfected with one or more gRNA molecules, for example when the base editor comprises a Cas9 (e.g., nCas9) domain. In some embodiments, a plasmid expressing a base editor may be introduced into cells through electroporation, transient transfection (e.g., lipofection, such as with Lipofectamine 3000®), stable genome integration (e.g., piggybac), viral transduction, or other methods known to those of skill in the art.

[0474] In some aspects, the invention provides methods comprising delivering one or more base editor-encoding polynucleotides, such as or one or more vectors as described herein encoding one or more components of the base editing system described herein, one or more transcripts thereof, and/or one or proteins transcribed therefrom, to a host cell. In some aspects, the invention further provides cells produced by such methods, and organisms (such as animals, plants, or fungi) comprising or produced from such cells. In some embodiments, a base editor as described herein in combination with (and optionally complexed with) a guide sequence is delivered to a cell. Conventional viral and non-viral based gene transfer methods can be used to introduce nucleic acids in mammalian cells or target tissues. Such methods can be used to administer nucleic acids encoding components of a base editor to cells in culture, or in a host organism. Non-viral vector delivery systems include DNA plasmids, RNA (e.g. a transcript of a vector described herein), naked nucleic acid, and nucleic acid complexed with a delivery vehicle, such as a liposome. Viral vector delivery systems include DNA and RNA viruses, which have either episomal or integrated genomes after delivery to the cell. For a review of gene therapy procedures, see Anderson, Science 256:808-813 (1992); Nabel & Felgner, TIBTECH 11:211-217 (1993); Mitani & Caskey, TIBTECH 11:162-166 (1993); Dillon, TIBTECH 11:167-175 (1993); Miller, Nature 357:455-460 (1992); Van Brunt, Biotechnology 6(10):1149-1154 (1988); Vigne, Restorative Neurology and Neuroscience 8:35-36 (1995); Kremer & Perricaudet, British Medical Bulletin 51(1):31-44 (1995); Haddada et al., in Current Topics in Microbiology and Immunology, Doerfler and Bihm (eds) (1995); and Yu et al., Gene Therapy 1:13-26 (1994).

[0475] Methods of non-viral delivery of nucleic acids include lipofection, nucleofection, microinjection, biolistics, virosomes, liposomes, immunoliposomes, polycation or lipid:nucleic acid conjugates, naked DNA, artificial virions, and agent-enhanced uptake of DNA. Lipofection is described in e.g., U.S. Pat. Nos. 5,049,386, 4,946,787; and 4,897,355) and lipofection reagents are sold commercially (e.g., Transfectam™ and Lipofectin™) Cationic and neutral lipids that are suitable for efficient receptor-recognition lipofection of polynucleotides include those of Feigner, WO 91/17424; WO 91/16024. Delivery can be to cells (e.g. in vitro or ex vivo administration) or target tissues (e.g. in vivo administration).

[0476] The preparation of lipid:nucleic acid complexes, including targeted liposomes such as immunolipid complexes, is well known to one of skill in the art (see, e.g., Crystal, Science 270:404-410 (1995); Blaese et al., Cancer Gene Ther. 2:291-297 (1995); Behr et al., Bioconjugate Chem. 5:382-389 (1994); Remy et al., Bioconjugate Chem. 5:647-654 (1994); Gao et al., Gene Therapy 2:710-722 (1995); Ahmad et al., Cancer Res. 52:4817-4820 (1992); U.S. Pat. Nos. 4,186,183, 4,217,344, 4,235,871, 4,261,975, 4,485,054, 4,501,728, 4,774,085, 4,837,028, and 4,946,787).

[0477] The use of RNA or DNA viral based systems for the delivery of nucleic acids take advantage of highly evolved processes for targeting a virus to specific cells in the body and trafficking the viral payload to the nucleus. Viral vectors can be administered directly to patients (in vivo) or they can be used to treat cells in vitro, and the modified cells may optionally be administered to patients (ex vivo). Conventional viral based systems could include retroviral, lentivirus, adenoviral, adeno-associated and herpes simplex virus vectors for gene transfer. Integration in the host genome is possible with the retrovirus, lentivirus, and adeno-associated virus gene transfer methods, often resulting in long term expression of the inserted transgene. Additionally, high transduction efficiencies have been observed in many different cell types and target tissues.

[0478] The tropism of a viruses can be altered by incorporating foreign envelope proteins, expanding the potential target population of target cells. Lentiviral vectors are retroviral vectors that are able to transduce or infect non-dividing cells and typically produce high viral titers. Selection of a retroviral gene transfer system would therefore depend on the target tissue. Retroviral vectors are comprised of cis-acting long terminal repeats with packaging capacity for up to 6-10 kb of foreign sequence. The minimum cis-acting LTRs are sufficient for replication and packaging of the vectors, which are then used to integrate the therapeutic gene into the target cell to provide permanent transgene expression. Widely used retroviral vectors include those based upon murine leukemia virus (MuLV), gibbon ape leukemia virus (GaLV), Simian Immuno deficiency virus (SIV), human immuno deficiency virus (HIV), and combinations thereof (see, e.g., Buchscher et al., J. Virol. 66:2731-2739 (1992); Johann et al., J. Virol. 66:1635-1640 (1992); Sommnerfelt et al., Virol. 176:58-59 (1990); Wilson et al., J. Virol. 63:2374-2378 (1989); Miller et al., J. Virol. 65:2220-2224 (1991); PCT/US94/05700). In applications where transient expression is preferred, adenoviral based systems may be used. Adenoviral-based vectors are capable of very high transduction efficiency in many cell types and do not require cell division. With such vectors, high titer and levels of expression have been obtained. This vector can be produced in large quantities in a relatively simple system. Adeno-associated virus (“AAV”) vectors may also be used to transduce cells with target nucleic acids, e.g., in the in vitro production of nucleic acids and peptides, and for in vivo and ex vivo gene therapy procedures (see, e.g., West et al., Virology 160:38-47 (1987); U.S. Pat. No. 4,797,368; WO 93/24641; Kotin, Human Gene Therapy 5:793-801 (1994); Muzyczka, J. Clin. Invest. 94:1351 (1994). Construction of recombinant AAV vectors is described in a number of publications, including U.S. Pat. No. 5,173,414; Tratschin et al., Mol. Cell. Biol. 5:3251-3260 (1985); Tratschin, et al., Mol. Cell. Biol. 4:2072-2081 (1984); Hermonat & Muzyczka, PNAS 81:6466-6470 (1984); and Samulski et al., J. Virol. 63:03822-3828 (1989).

[0479] Packaging cells are typically used to form virus particles that are capable of infecting a host cell. Such cells include 293 cells, which package adenovirus, and w2 cells or PA317 cells, which package retrovirus. Viral vectors used in gene therapy are usually generated by producing a cell line that packages a nucleic acid vector into a viral particle. The vectors typically contain the minimal viral sequences required for packaging and subsequent integration into a host, other viral sequences being replaced by an expression cassette for the polynucleotide(s) to be expressed. The missing viral functions are typically supplied in trans by the packaging cell line. For example, AAV vectors used in gene therapy typically only possess ITR sequences from the AAV genome which are required for packaging and integration into the host genome. Viral DNA is packaged in a cell line, which contains a helper plasmid encoding the other AAV genes, namely rep and cap, but lacking ITR sequences. The cell line may also be infected with adenovirus as a helper. The helper virus promotes replication of the AAV vector and expression of AAV genes from the helper plasmid. The helper plasmid is not packaged in significant amounts due to a lack of ITR sequences. Contamination with adenovirus can be reduced by, e.g., heat treatment to which adenovirus is more sensitive than AAV. Additional methods for the delivery of nucleic acids to cells are known to those skilled in the art. Reference is made to US 2003/0087817, published May 8, 2003, International Patent Application No. WO 2016/205764, published Dec. 22, 2016, International Patent Application No. WO 2018/071868, published Apr. 19, 2018, U.S. Patent Publication No. 2018/0127780, published May 10, 2018, and International Publication No. WO2020/236982, published Nov. 26, 2020, the disclosures of each of which are incorporated herein by reference.

[0480] In various embodiments, the base editor constructs (including, the split-constructs) may be engineered for delivery in one or more rAAV vectors. An rAAV as related to any of the methods and compositions provided herein may be of any serotype including any derivative or pseudotype (e.g., 1, 2, 3, 4, 5, 6, 7, 8, 9, 10, 11, 12, 13, 2/1, 2/5, 2/8, 2/9, 3/1, 3/5, 3/8, or 3/9). In other embodiments, the rAAV may be an rAAV1, rAAV2, rAAV3, rAAV4, rAAV5, rAAV6, rAAV7, rAAV8, rAAV9, rAAV10, rAAV12, or rAAV12 vector or particle. In certain embodiments, the discosed rAAV is of serotype 9, i.e., AAV9. An rAAV may comprise a genetic load (i.e., a recombinant nucleic acid vector that expresses a gene of interest, such as a whole or split base editor that is carried by the rAAV into a cell) that is to be delivered to a cell. An rAAV may be chimeric.

[0481] As used herein, the serotype of an rAAV refers to the serotype of the capsid proteins of the recombinant virus. Non-limiting examples of derivatives and pseudotypes include rAAV2/1, rAAV2/5, rAAV2/8, rAAV2/9, AAV2-AAV3 hybrid, AAVrh.10, AAVrh.74, AAVhu.14, AAV3a/3b, AAVrh32.33, AAV-HSC15, AAV-HSC17, AAVhu.37, AAVrh.8, CHt-P6, AAV2.5, AAV6.2, AAV2i8, AAV-HSC15/17, AAVM41, AAV9.45, AAV6(Y445F/Y731F), AAV2.5T, AAV-HAE1/2, AAV clone 32/83, AAVShH10, AAV2 (Y->F), AAV8 (Y733F), AAV2.15, AAV2.4, AAVM41, and AAVr3.45. A non-limiting example of derivatives and pseudotypes that have chimeric VP1 proteins is rAAV2/5-1VP1u, which has the genome of AAV2, capsid backbone of AAVS and VP1u of AAV1. Other non-limiting example of derivatives and pseudotypes that have chimeric VP1 proteins are rAAV2/5-8VP1u, rAAV2/9-1VP1u, and rAAV2/9-8VP1u.

[0482] AAV derivatives/pseudotypes, and methods of producing such derivatives/pseudotypes are known in the art (see, e.g., Mol Ther. 2012 Apr; 20(4):699-708. doi: 10.1038/mt.2011.287. Epub 2012 Jan 24. The AAV vector toolkit: poised at the clinical crossroads. Asokan A L, Schaffer D V, Samulski R J.). Methods for producing and using pseudotyped rAAV vectors are known in the art (see, e.g., Duan et al., J. Virol., 75:7662-7671, 2001; Halbert et al., J. Virol., 74:1524-1532, 2000; Zolotukhin et al., Methods, 28:158-167, 2002; and Auricchio et al., Hum. Molec. Genet., 10:3075-3081, 2001).

[0483] Methods of making or packaging rAAV particles are known in the art and reagents are commercially available (see, e.g., Zolotukhin et al. Production and purification of serotype 1, 2, and 5 recombinant adeno-associated viral vectors. Methods 28 (2002) 158-167; and U.S. Patent Publication Numbers US20070015238 and US20120322861, which are incorporated herein by reference; and plasmids and kits available from ATCC and Cell Biolabs, Inc.). For example, a plasmid comprising a gene of interest may be combined with one or more helper plasmids, e.g., that contain a rep gene (e.g., encoding Rep78, Rep68, Rep52 and Rep40) and a cap gene (encoding VP1, VP2, and VP3, including a modified VP2 region as described herein), and transfected into a recombinant cells such that the rAAV particle can be packaged and subsequently purified.

[0484] Recombinant AAV may comprise a nucleic acid vector, which may comprise at a minimum: (a) one or more heterologous nucleic acid regions comprising a sequence encoding a protein or polypeptide of interest or an RNA of interest (e.g., a siRNA or microRNA), and (b) one or more regions comprising inverted terminal repeat (ITR) sequences (e.g., wild-type ITR sequences or engineered ITR sequences) flanking the one or more nucleic acid regions (e.g., heterologous nucleic acid regions). Herein, heterologous nucleic acid regions comprising a sequence encoding a protein of interest or RNA of interest are referred to as genes of interest.

[0485] Any one of the rAAV particles provided herein may have capsid proteins that have amino acids of different serotypes outside of the VP1u region. In some embodiments, the serotype of the backbone of the VP1 protein is different from the serotype of the ITRs and/or the Rep gene. In some embodiments, the serotype of the backbone of the VP1 capsid protein of a particle is the same as the serotype of the ITRs. In some embodiments, the serotype of the backbone of the VP1 capsid protein of a particle is the same as the serotype of the Rep gene. In some embodiments, capsid proteins of rAAV particles comprise amino acid mutations that result in improved transduction efficiency.

[0486] In some embodiments, the nucleic acid vector comprises one or more regions comprising a sequence that facilitates expression of the nucleic acid (e.g., the heterologous nucleic acid), e.g., expression control sequences operatively linked to the nucleic acid. Numerous such sequences are known in the art. Non-limiting examples of expression control sequences include promoters, insulators, silencers, response elements, introns, enhancers, initiation sites, termination signals, and poly(A) tails. Any combination of such control sequences is contemplated herein (e.g., a promoter and an enhancer).

[0487] Final AAV constructs may incorporate a sequence encoding the gRNA. In other embodiments, the AAV constructs may incorporate a sequence encoding the second-site nicking guide RNA. In still other embodiments, the AAV constructs may incorporate a sequence encoding the second-site nicking guide RNA and a sequence encoding the gRNA.

[0488] In various embodiments, the gRNAs and the second-site nicking guide RNAs can be expressed from an appropriate promoter, such as a human U6 (hU6) promoter, a mouse U6 (mU6) promoter, or other appropriate promoter. The gRNAs and the second-site nicking guide RNAs can be driven by the same promoters or different promoters.

[0489] In some embodiments, a rAAV constructs or the herein compositions are administered to a subject enterally. In some embodiments, a rAAV constructs or the herein compositions are administered to the subject parenterally. In some embodiments, a rAAV particle or the herein compositions are administered to a subject subcutaneously, intraocularly, intravitreally, subretinally, intravenously (IV), intracerebro-ventricularly, intramuscularly, intrathecally (IT), intracisternally, intraperitoneally, via inhalation, topically, or by direct injection to one or more cells, tissues, or organs.

[0490] In some embodiments, any of the disclosed rAAV vectors or particles comprising same are administered subretinally. In particular embodiments, any of the disclosed rAAV vectors or particles comprising same are administered subretinally to the eye of a subject. Any of the disclosed rAAV particles may be administered by injection to the inner ear of a subject. In particular embodiments, the disclosed rAAV vectors are formulated for delivery to a retina or an inner ear of the subject by injection.

[0491] In other aspects, the base editors can be divided at a split site and provided as two halves of a whole/complete base editor. The two halves can be delivered to cells (e.g., as expressed proteins or on separate expression vectors) and once in contact inside the cell, the two halves form the complete base editor through the self-splicing action of the inteins on each base editor half. Split intein sequences can be engineered into each of the halves of the encoded base editor to facilitate their transplicing inside the cell and the concomitant restoration of the complete, functioning base editor.

[0492] These split intein-based methods overcome several barriers to in vivo delivery. For example, the DNA encoding base editors is larger than the rAAV packaging limit, and so requires special solutions. One such solution is formulating the editor fused to split intein pairs that are packaged into two separate rAAV particles that, when co-delivered to a cell, reconstitute the functional editor protein.

[0493] In this aspect, the base editors can be divided at a split site and provided as two halves of a whole/complete base editor. The two halves can be delivered to cells (e.g., as expressed proteins or on separate expression vectors) and once in contact inside the cell, the two halves form the complete base editor through the self-splicing action of the inteins on each base editor half. Split intein sequences can be engineered into each of the halves of the encoded base editor to facilitate their transplicing inside the cell and the concomitant restoration of the complete, functioning base editor.

[0494] In various embodiments, the base editors may be engineered as two half proteins (i.e., a BE N-terminal half and a BE C-terminal half) by “splitting” the whole base editor as a “split site.” The “split site” refers to the location of insertion of split intein sequences (i.e., the N intein and the C intein) between two adjacent amino acid residues in the base editor. More specifically, the “split site” refers to the location of dividing the whole base editor into two separate halves, wherein in each halve is fused at the split site to either the N intein or the C intein motifs. The split site can be at any suitable location in the base editor, but preferably the split site is located at a position that allows for the formation of two half proteins which are appropriately sized for delivery (e.g., by expression vector) and wherein the inteins, which are fused to each half protein at the split site termini, are available to sufficiently interact with one another when one half protein contacts the other half protein inside the cell. In particular embodiments, the split site is at an amino acid residue within give or fewer positions of residue 638 of the napDNAbp domain. In particular embodiments, the split site is at residue 574 or residue 638 of the napDNAbp domain (e.g., an SpCas9 domain) of any of the disclosed base editors. In particular embodiments, the split site is immediately before Cys 574 or before Thr 638 (i.e., immediately after residue 573 or after residue 637) of an SpCas9 nickase domain (SEQ ID NO: 107) of the base editor. In other embodiments, the split site is immediately before Cys 574 or before Thr 638 (i.e., immediately after residue 573 or after residue 637) of an SpCas9 wild-type domain (SEQ ID NO: 74) of the base editor.

[0495] In some embodiments, the split site is located in the napDNAbp domain. In other embodiments, the split site is located in the RT domain. In other embodiments, the split site is located in a linker that joins the napDNAbp domain and the RT domain.

[0496] In various embodiments, split site design requires finding sites to split and insert an N- and C-terminal intein that are both structurally permissive for purposes of packaging the two half base editor domains into two different AAV genomes. Additionally, intein residues necessary for trans splicing can be incorporated by mutating residues at the N terminus of the C terminal extein or inserting residues that will leave an intein “scar.” In various embodiments, using SpCas9 nickase (SEQ ID NO: 74, 1368 amino acids) as an example, the split can be between any two amino acids between 1 and 1368. Preferred splits, however, will be located between the central region of the protein, e.g., from amino acids 50-1250, or from 100-1200, or from 150-1150, or from 200-1100, or from 250-1050, or from 300-1000, or from 350-950, or from 400-900, or from 450-850, or from 500-800, or from 550-750, or from 600-700 of SEQ ID NO: 74. In specific exemplary embodiments, the split site may be between 740/741, or 801/802, or 1010/1011, or 1041/1042. In other embodiments the split site may be between 1/2, 2/3, 3/4, 4/5, 5/6, 6/7, 7/8, 8/9, 9/10, 10/11, 12/13, 14/15, 15/16, 17/18, 19/20 . . . 50/51 . . . 100/101 . . . 200/201 . . . 300/301 . . . 400/401 . . . 500/501 . . . 600/601 . . . 700/701 . . . 800/801 . . . 900/901 . . . 1000/1001 . . . 1100/1101 . . . 1200/1201 . . . 1300/1301 . . . and 1367/1368, including all adjacent pairs of amino acid residues.

[0497] In various embodiments, the split inteins can be used to separately deliver separate portions of a complete base editor to a cell, which upon expression in a cell, become reconstituted as a complete base editor through the trans splicing.

[0498] In some embodiments, the disclosure provides a method of delivering a base editor to a cell, comprising: constructing a first expression vector encoding an N-terminal fragment of the base editor fused to a first split intein sequence; constructing a second expression vector encoding a C-terminal fragment of the base editor fused to a second split intein sequence; delivering the first and second expression vectors to a cell, wherein the N-terminal and C-terminal fragment are reconstituted as the base editor in the cell as a result of trans splicing activity causing self-excision of the first and second split intein sequences.

[0499] In other embodiments, the split site is in the napDNAbp domain. In still other embodiments, the split site is in the cytosine deaminase or adenosine deaminase domain. In yet other embodiments, the split site is in the linker.

[0500] Accordingly, in some aspects, the disclosure provides compositions comprising: (i) a first recombinant adeno associated virus (rAAV) particle comprising a first nucleotide sequence (or vector) encoding a N-terminal portion of any of the disclosed base editors fused at its C-terminus to an intein-N; and (ii) a second recombinant adeno associated virus (rAAV) particle comprising a second nucleotide sequence (or vector) encoding an intein-C fused to the N-terminus of a C-terminal portion of the base editor, wherein at least one of the first nucleotide sequence and second nucleotide sequence is operably linked to a first promoter. In certain embodiments, at least one of the first nucleotide sequence and second nucleotide sequence comprises (e.g., at its 3′ end) a gRNA nucleic acid segment encoding a guide RNA operably linked to a second promoter. In some embodiments, the direction of transcription of the guide RNA nucleic acid segment is reversed relative to the direction of transcription of the at least one nucleotide sequence. In some embodiments, the gRNA is provided on a separate vector or nucleotide sequence. In some embodiments, the N-terminal portion of the base editor comprises a portion of any one of SEQ ID NOs: 350-388 that corresponds to amino acids 1-573 of the napDNAbp domain of the base editor, and the C-terminal portion of the base editor comprises a portion of any one of SEQ ID NOs: 350-388 that corresponds to amino acids 574-1368 of the napDNAbp domain of the base editor.

[0501] In other embodiments, the base editors may be delivered by ribonucleoprotein complexes. In this aspect, the base editors may be delivered by non-viral delivery strategies involving delivery of a base editor complexed with a gRNA (i.e., a BE ribonucleoprotein complex) by various methods, including electroporation and lipid nanoparticles. Methods of non-viral delivery of nucleic acids include lipofection, nucleofection, microinjection, biolistics, virosomes, liposomes, immunoliposomes, polycation or lipid:nucleic acid conjugates, naked DNA, artificial virions, and agent-enhanced uptake of DNA. Lipofection is described in e.g., U.S. Pat. Nos. 5,049,386, 4,946,787; and 4,897,355) and lipofection reagents are sold commercially (e.g., Transfectam™ and Lipofectin™). Cationic and neutral lipids that are suitable for efficient receptor-recognition lipofection of polynucleotides include those of Feigner, WO 91/17424; WO 91/16024. Delivery can be to cells (e.g. in vitro or ex vivo administration) or target tissues (e.g. in vivo administration).

[0502] The preparation of lipid:nucleic acid complexes, including targeted liposomes such as immunolipid complexes, is well known to one of skill in the art (see, e.g., Crystal, Science 270:404-410 (1995); Blaese et al., Cancer Gene Ther. 2:291-297 (1995); Behr et al., Bioconjugate Chem. 5:382-389 (1994); Remy et al., Bioconjugate Chem. 5:647-654 (1994); Gao et al., Gene Therapy 2:710-722 (1995); Ahmad et al., Cancer Res. 52:4817-4820 (1992); U.S. Pat. Nos. 4,186,183, 4,217,344, 4,235,871, 4,261,975, 4,485,054, 4,501,728, 4,774,085, 4,837,028, and 4,946,787).

### Pharmaceutical Compositions

[0503] Other aspects of the present disclosure relate to pharmaceutical compositions comprising any of the adenosine deaminases, base editors, or the base editor-gRNA complexes described herein. The term “pharmaceutical composition”, as used herein, refers to a composition formulated for pharmaceutical use. In some embodiments, the pharmaceutical composition further comprises a pharmaceutically acceptable carrier. In some embodiments, the pharmaceutical composition comprises additional agents (e.g. for specific delivery, increasing half-life, or other therapeutic compounds).

[0504] In some embodiments, any of the base editors, gRNAs, and/or complexes described herein are provided as part of a pharmaceutical composition. In some embodiments, the pharmaceutical composition comprises any of the base editors described herein. In some embodiments, the pharmaceutical composition comprises any of the complexes provided herein. In some embodiments pharmaceutical composition comprises a gRNA, a base editor, and a pharmaceutically acceptable excipient. Pharmaceutical compositions may optionally comprise one or more additional therapeutically active substances.

[0505] In some embodiments, compositions provided herein are formulated for delivery to a subject, for example, to a human subject, in order to effect a targeted genomic modification within the subject. In some embodiments, cells are obtained from the subject and contacted with a any of the pharmaceutical compositions provided herein. In some embodiments, cells removed from a subject and contacted ex vivo with a pharmaceutical composition are re-introduced into the subject, optionally after the desired genomic modification has been effected or detected in the cells. Methods of delivering pharmaceutical compositions comprising nucleases are known, and are described, for example, in U.S. Pat. Nos. 6,453,242; 6,503,717; 6,534,261; 6,599,692; 6,607,882; 6,689,558; 6,824,978; 6,933,113; 6,979,539; 7,013,219; 7,163,824, 9,526,784; 9,737,604; and U.S. Patent Publication Nos. 2018/0127780, published May 10, 2018, and 2018/0236081, published Aug. 23, 2018, the disclosures of all of which are incorporated by reference herein in their entireties. Although the descriptions of pharmaceutical compositions provided herein are principally directed to pharmaceutical compositions which are suitable for administration to humans, it will be understood by the skilled artisan that such compositions are generally suitable for administration to animals or organisms of all sorts. Modification of pharmaceutical compositions suitable for administration to humans in order to render the compositions suitable for administration to various animals is well understood, and the ordinarily skilled veterinary pharmacologist can design and/or perform such modification with merely ordinary, if any, experimentation. Subjects to which administration of the pharmaceutical compositions is contemplated include, but are not limited to, humans and/or other primates; mammals, domesticated animals, pets, and commercially relevant mammals such as cattle, pigs, horses, sheep, cats, dogs, mice, and/or rats; and/or birds, including commercially relevant birds such as chickens, ducks, geese, and/or turkeys.

[0506] Formulations of the pharmaceutical compositions described herein may be prepared by any method known or hereafter developed in the art of pharmacology. In general, such preparatory methods include the step of bringing the active ingredient(s) into association with an excipient and/or one or more other accessory ingredients, and then, if necessary and/or desirable, shaping and/or packaging the product into a desired single- or multi-dose unit.

[0507] Pharmaceutical formulations may additionally comprise a pharmaceutically acceptable excipient, which, as used herein, includes any and all solvents, dispersion media, diluents, or other liquid vehicles, dispersion or suspension aids, surface active agents, isotonic agents, thickening or emulsifying agents, preservatives, solid binders, lubricants and the like, as suited to the particular dosage form desired. Remington's The Science and Practice of Pharmacy, 21^{st} Edition, A. R. Gennaro (Lippincott, Williams & Wilkins, Baltimore, Md., 2006; incorporated in its entirety herein by reference) discloses various excipients used in formulating pharmaceutical compositions and known techniques for the preparation thereof. See also PCT application PCT/US2010/055131, filed Nov. 2, 2010 (Publication No. WO 2011/053982, published May 5, 2011), incorporated in its entirety herein by reference, for additional suitable methods, reagents, excipients and solvents for producing pharmaceutical compositions comprising a nuclease. Except insofar as any conventional excipient medium is incompatible with a substance or its derivatives, such as by producing any undesirable biological effect or otherwise interacting in a deleterious manner with any other component(s) of the pharmaceutical composition, its use is contemplated to be within the scope of this disclosure.

[0508] As used here, the term “pharmaceutically-acceptable carrier” means a pharmaceutically-acceptable material, composition or vehicle, such as a liquid or solid filler, diluent, excipient, manufacturing aid (e.g., lubricant, talc magnesium, calcium or zinc stearate, or steric acid), or solvent encapsulating material, involved in carrying or transporting the compound from one site (e.g., the delivery site) of the body, to another site (e.g., organ, tissue or portion of the body). A pharmaceutically acceptable carrier is “acceptable” in the sense of being compatible with the other ingredients of the formulation and not injurious to the tissue of the subject (e.g., physiologically compatible, sterile, physiologic pH, etc.). Some examples of materials which can serve as pharmaceutically-acceptable carriers include: (1) sugars, such as lactose, glucose and sucrose; (2) starches, such as corn starch and potato starch; (3) cellulose, and its derivatives, such as sodium carboxymethyl cellulose, methylcellulose, ethyl cellulose, microcrystalline cellulose and cellulose acetate; (4) powdered tragacanth; (5) malt; (6) gelatin; (7) lubricating agents, such as magnesium stearate, sodium lauryl sulfate and talc; (8) excipients, such as cocoa butter and suppository waxes; (9) oils, such as peanut oil, cottonseed oil, safflower oil, sesame oil, olive oil, corn oil and soybean oil; (10) glycols, such as propylene glycol; (11) polyols, such as glycerin, sorbitol, mannitol and polyethylene glycol (PEG); (12) esters, such as ethyl oleate and ethyl laurate; (13) agar; (14) buffering agents, such as magnesium hydroxide and aluminum hydroxide; (15) alginic acid; (16) pyrogen-free water; (17) isotonic saline; (18) Ringer's solution; (19) ethyl alcohol; (20) pH buffered solutions; (21) polyesters, polycarbonates and/or polyanhydrides; (22) bulking agents, such as polypeptides and amino acids (23) serum component, such as serum albumin, HDL and LDL; (22) C2-C12 alcohols, such as ethanol; and (23) other non-toxic compatible substances employed in pharmaceutical formulations. Wetting agents, coloring agents, release agents, coating agents, sweetening agents, flavoring agents, perfuming agents, preservative and antioxidants can also be present in the formulation. The terms such as “excipient”, “carrier”, “pharmaceutically acceptable carrier” or the like are used interchangeably herein.

[0509] In some embodiments, the pharmaceutical composition is administered to a subject along with a standard of care treatment for visual loss or hearing loss. Certain visual loss and hearing loss therapies are known in the art.

[0510] In some embodiments, the pharmaceutical compositions described herein can be combined with immunomodulatory treatments such as, e.g., inhibitors of a checkpoint molecule (e.g., PD-1, PD-L1, PD-L2, CTLA-4, LAGS, TIM-3, VISTA, TIGIT, CSF1R, CD112R (PVRIG), CD155 (PVR), B7-H2, B7-H4, BTLA, or A2aR). In some embodiments, the pharmaceutical compositions described herein are administered sequentially (in any order) or substantially simultaneously with an anti-PD-1 or anti-PD-L1 antibody, such as nivolumab, pembrolizumab, avelumab, durvalumab or atezolizumab. Additional examples of immunomodulatory therapies include activators that enhance the activity of stimulatory checkpoint such as CD122 (IL2) agonist, 4-1BB, ICOS ligand, GITR, and OX40. Further useful agents are also referenced in Physician's Desk Reference, 59.sup.th edition, (2005), Thomson P D R, Montvale N.J.; Gennaro et al., Eds. Remington's The Science and Practice of Pharmacy 20th edition, (2000), Lippincott Williams and Wilkins, Baltimore Md.; Braunwald et al., Eds. Harrison's Principles of Internal Medicine, 15.sup.th edition, (2001), McGraw Hill, NY; Berkow et al., Eds. The Merck Manual of Diagnosis and Therapy, (1992), Merck Research Laboratories, Rahway N.J.

[0511] Alternatively or in addition, the treatment of the present disclosure can be combined with a chemotherapeutic agent, for example, pyrimidine analogs (5-fluorouracil, floxuridine, capecitabine, gemcitabine and cytarabine), purine analogs, folate antagonists and related inhibitors (mercaptopurine, thioguanine, pentostatin and 2-chlorodeoxyadenosine (cladribine)); antiproliferative/antimitotic agents including natural products such as vinca alkaloids (vinblastine, vincristine, and vinorelbine), microtubule disruptors such as taxane (paclitaxel, docetaxel), vincristin, vinblastin, nocodazole, epothilones and navelbine, epidipodophyllotoxins (etoposide, teniposide), DNA damaging agents (actinomycin, amsacrine, anthracyclines, bleomycin, busulfan, camptothecin, carboplatin, chlorambucil, cisplatin, cyclophosphamide, cytoxan, dactinomycin, daunorubicin, doxorubicin, epirubicin, hexamethyhnelamineoxaliplatin, iphosphamide, melphalan, merchlorehtamine, mitomycin, mitoxantrone, nitrosourea, plicamycin, procarbazine, taxol, taxotere, teniposide, triethylenethiophosphoramide and etoposide (VP16)); antibiotics such as dactinomycin (actinomycin D), daunorubicin, doxorubicin (adriamycin), idarubicin, anthracyclines, mitoxantrone, bleomycins, plicamycin (mithramycin) and mitomycin; enzymes (L-asparaginase which systemically metabolizes L-asparagine and deprives cells which do not have the capacity to synthesize their own asparagine); antiplatelet agents; antiproliferative/antimitotic alkylating agents such as nitrogen mustards (mechlorethamine, cyclophosphamide and analogs, melphalan, chlorambucil), ethylenimines and methylmelamines (hexamethylmelamine and thiotepa), alkyl sulfonates-busulfan, nitrosoureas (carmustine (BCNU) and analogs, streptozocin), trazenes-dacarbazinine (DTIC); antiproliferative/antimitotic antimetabolites such as folic acid analogs (methotrexate); platinum coordination complexes (cisplatin, carboplatin), procarbazine, hydroxyurea, mitotane, aminoglutethimide; hormones, hormone analogs (estrogen, tamoxifen, goserelin, bicalutamide, nilutamide) and aromatase inhibitors (letrozole, anastrozole); anticoagulants (heparin, synthetic heparin salts and other inhibitors of thrombin); fibrinolytic agents (such as tissue plasminogen activator, streptokinase and urokinase), aspirin, dipyridamole, ticlopidine, clopidogrel, abciximab; antimigratory agents; antisecretory agents (breveldin); immunosuppressives (cyclosporine, tacrolimus (FK-506), sirolimus (rapamycin), azathioprine, mycophenolate mofetil); anti-angiogenic compounds (e.g., TNP-470, genistein, bevacizumab) and growth factor inhibitors (e.g., fibroblast growth factor (FGF) inhibitors); angiotensin receptor blocker; nitric oxide donors; anti-sense oligonucleotides; antibodies (trastuzumab); cell cycle inhibitors and differentiation inducers (tretinoin); mTOR inhibitors, topoisomerase inhibitors (doxorubicin (adriamycin), amsacrine, camptothecin, daunorubicin, dactinomycin, eniposide, epirubicin, etoposide, idarubicin and mitoxantrone, topotecan, irinotecan), corticosteroids (cortisone, dexamethasone, hydrocortisone, methylpednisolone, prednisone, and prenisolone); growth factor signal transduction kinase inhibitors; mitochondrial dysfunction inducers and caspase activators; and chromatin disruptors.

[0512] The term “combination therapy” as used herein, encompasses administration of the pharmaceutical compositions and one or more other therapies in a sequential manner, that is, wherein each therapeutic agent is administered at a different time, as well as administration of the pharmaceutical compositions and one or more other therapies in a substantially simultaneous manner.

[0513] Sequential or substantially simultaneous administration of each agent (therapy) can be affected by any appropriate route including, but not limited to, oral routes, intravenous routes, intramuscular, subcutaneous routes, and direct absorption through mucous membrane tissues. The agents can be administered by the same route or by different routes. For example, a first agent can be administered orally, and a second agent can be administered intravenously.

[0514] As used herein, the term “sequential” means, unless otherwise specified, characterized by a regular sequence or order, e.g., if a dosage regimen includes the administration of a first therapeutic agent and a second therapeutic agent, a sequential dosage regimen could include administration of the first therapeutic agent before, simultaneously, substantially simultaneously, or after administration of the second therapeutic agent, but both agents will be administered in a regular sequence or order. The term “separate” means, unless otherwise specified, to keep apart one from the other. The term “simultaneously” means, unless otherwise specified, happening or done at the same time, i.e., the agents of the invention are administered at the same time. The term “substantially simultaneously” means that the agents are administered within minutes of each other (e.g., within 10 minutes of each other) and intends to embrace joint administration as well as consecutive administration, but if the administration is consecutive it is separated in time for only a short period (e.g., the time it would take a medical practitioner to administer two agents separately). As used herein, concurrent administration and substantially simultaneous administration are used interchangeably. Sequential administration refers to temporally separated administration of the agents described herein.

[0515] When co-administered with an additional therapeutic agent, suitable therapeutically effective dosages for each agent may be lowered due to the additive action or synergy. The efficacy of the methods described herein (e.g., administration of the pharmaceutical composition alone or as part of a combination therapy) may be assessed by any method known in the art and would be evident to a skilled medical professional. For example, the efficacy of the therapies described herein may be assessed by survival of the subject. In some embodiments, the therapy is assessed based on the safety or toxicity of the therapy in the subject, for example, by the overall health of the subject and/or the presence of adverse events or severe adverse events.

[0516] In some embodiments, the pharmaceutical composition is formulated for delivery to a subject, e.g., for gene editing. Suitable routes of administrating the pharmaceutical composition described herein include, without limitation: topical, subcutaneous, transdermal, intradermal, intralesional, intraarticular, intraperitoneal, intravesical, transmucosal, gingival, intradental, intracochlear, transtympanic, intraorgan, epidural, intrathecal, intramuscular, intravenous, intravascular, intraosseus, periocular, intratumoral, intracerebral, and intracerebroventricular administration. In one embodiment, the pharmaceutical composition is formulated for delivery to a subject via the intratumoral route.

[0517] In some embodiments, the pharmaceutical composition described herein is administered locally to a diseased site (e.g., tumor site). In some embodiments, the pharmaceutical composition described herein is administered to a subject by injection, by means of a catheter, by means of a suppository, or by means of an implant, the implant being of a porous, non-porous, or gelatinous material, including a membrane, such as a sialastic membrane, or a fiber.

[0518] In other embodiments, the pharmaceutical composition described herein is delivered in a controlled release system. In one embodiment, a pump may be used (see, e.g., Langer, 1990, Science 249:1527-1533; Sefton, 1989, CRC Crit. Ref. Biomed. Eng. 14:201; Buchwald et al., 1980, Surgery 88:507; Saudek et al., 1989, N. Engl. J. Med. 321:574). In another embodiment, polymeric materials can be used. (See, e.g., Medical Applications of Controlled Release (Langer and Wise eds., CRC Press, Boca Raton, Fla., 1974); Controlled Drug Bioavailability, Drug Product Design and Performance (Smolen and Ball eds., Wiley, New York, 1984); Ranger and Peppas, 1983, Macromol. Sci. Rev. Macromol. Chem. 23:61. See also Levy et al., 1985, Science 228:190; During et al., 1989, Ann. Neurol. 25:351; Howard et al., 1989, J. Neurosurg. 71:105.). Other controlled release systems are discussed, for example, in Langer, supra.

[0519] In some embodiments, the pharmaceutical composition is formulated in accordance with routine procedures as a composition adapted for intravenous or subcutaneous administration to a subject, e.g., a human. In some embodiments, pharmaceutical compositions for administration by injection are solutions in sterile isotonic aqueous buffer. Where necessary, the pharmaceutical can also include a solubilizing agent and a local anesthetic such as lignocaine to ease pain at the site of the injection. Generally, the ingredients are supplied either separately or mixed together in unit dosage form, for example, as a dry lyophilized powder or water free concentrate in a hermetically sealed container such as an ampoule or sachette indicating the quantity of active agent. Where the pharmaceutical is to be administered by infusion, it can be dispensed with an infusion bottle containing sterile pharmaceutical grade water or saline. Where the pharmaceutical composition is administered by injection, an ampoule of sterile water for injection or saline can be provided so that the ingredients can be mixed prior to administration.

[0520] In some embodiments, any of the disclosed pharmaceutical compositions are administered subretinally. In particular embodiments, any of the disclosed pharmaceutical compositions are administered subretinally to the eye of a subject. In some embodiments, any of the disclosed pharmaceutical compositions are administered to the inner ear of a subject. In particular embodiments, the disclosed pharmaceutical compositions are formulated for delivery to a retina or an inner ear of the subject by injection.

[0521] A pharmaceutical composition for systemic administration may be a liquid, e.g., sterile saline, lactated Ringer's or Hank's solution. In addition, the pharmaceutical composition can be in solid forms and re-dissolved or suspended immediately prior to use. Lyophilized forms are also contemplated.

[0522] The pharmaceutical composition can be contained within a lipid particle or vesicle, such as a liposome or microcrystal, which is also suitable for parenteral administration. The particles can be of any suitable structure, such as unilamellar or plurilamellar, so long as compositions are contained therein. Compounds can be entrapped in “stabilized plasmid-lipid particles” (SPLP) containing the fusogenic lipid dioleoylphosphatidylethanolamine (DOPE), low levels (5-10 mol %) of cationic lipid, and stabilized by a polyethyleneglycol (PEG) coating (Zhang Y. P. et al., Gene Ther. 1999, 6:1438-47). Positively charged lipids such as N-[1-(2,3-dioleoyloxi)propyl]-N,N,N-trimethyl-amoniummethylsulfate, or “DOTAP,” are particularly preferred for such particles and vesicles. The preparation of such lipid particles is well known. See, e.g., U.S. Pat. Nos. 4,880,635; 4,906,477; 4,911,928; 4,917,951; 4,920,016; and 4,921,757; each of which is incorporated herein by reference.

[0523] The pharmaceutical composition described herein may be administered or packaged as a unit dose, for example. The term “unit dose” when used in reference to a pharmaceutical composition of the present disclosure refers to physically discrete units suitable as unitary dosage for the subject, each unit containing a predetermined quantity of active material calculated to produce the desired therapeutic effect in association with the required diluent; i.e., carrier, or vehicle.

[0524] Further, the pharmaceutical composition can be provided as a pharmaceutical kit comprising (a) a container containing a compound of the invention in lyophilized form and (b) a second container containing a pharmaceutically acceptable diluent (e.g., sterile water) for injection. Optionally, the kit may comprise a further therapy, for example, (c) a contain containing an immune checkpoint inhibitor (e.g., anti-PD-1 antibody). The pharmaceutically acceptable diluent can be used for reconstitution or dilution of the lyophilized compound of the invention. Optionally associated with such container(s) can be a notice in the form prescribed by a governmental agency regulating the manufacture, use or sale of pharmaceuticals or biological products, which notice reflects approval by the agency of manufacture, use or sale for human administration.

[0525] In another aspect, an article of manufacture containing materials useful for the treatment of the diseases described above is included. In some embodiments, the article of manufacture comprises a container and a label. Suitable containers include, for example, bottles, vials, syringes, and test tubes. The containers may be formed from a variety of materials such as glass or plastic. In some embodiments, the container holds a composition that is effective for treating a disease described herein and may have a sterile access port. For example, the container may be an intravenous solution bag or a vial having a stopper pierceable by a hypodermic injection needle. The active agent in the composition is a compound of the invention. In some embodiments, the label on or associated with the container indicates that the composition is used for treating the disease of choice. The article of manufacture may further comprise a second container comprising a pharmaceutically-acceptable buffer, such as phosphate-buffered saline, Ringer's solution, or dextrose solution. It may further include other materials desirable from a commercial and user standpoint, including other buffers, diluents, filters, needles, syringes, and package inserts with instructions for use.

### Kits, Cells, and Uses

[0526] This disclosure provides kits comprising a nucleic acid construct comprising nucleotide sequences encoding the base editors, gRNAs, and/or complexes described herein. Some embodiments of this disclosure provide kits comprising a nucleic acid construct comprising a nucleotide sequence encoding an deaminase-napDNAbp base editor capable of deaminating an adenosine in a nucleic acid molecule. In some embodiments, the nucleotide sequence encodes any of the ABEs or CBEs provided herein. In some embodiments, the nucleotide sequence encodes any of the complexes of ABEs or CBEs and gRNA sequences provided herein. In some embodiments, the nucleotide sequence comprises a heterologous promoter that drives expression of the ABE. The nucleotide sequence may further comprise a heterologous promoter that drives expression of the gRNA, or a heterologous promoter that drives expression of the base editor and the gRNA.

[0527] In some embodiments, the kit further comprises an expression construct encoding a guide nucleic acid backbone, e.g., a guide RNA backbone, wherein the construct comprises a cloning site positioned to allow the cloning of a nucleic acid sequence identical or complementary to a target sequence into the guide nucleic acid, e.g., guide RNA backbone.

[0528] The disclosure further provides kits comprising a base editor as provided herein, a gRNA having complementarity to a target sequence, and one or more of the following: cofactor proteins, buffers, media, and target cells (e.g., human cells). Kits may comprise combinations of several or all of the aforementioned components.

[0529] Some embodiments of this disclosure provide kits comprising a nucleic acid construct, comprising (a) a nucleotide sequence encoding a napDNAbp (e.g., a Cas9 domain) fused to an deaminase domain; and (b) a heterologous promoter that drives expression of the sequence of (a). In some embodiments, the kit further comprises an expression construct encoding a guide nucleic acid backbone, e.g., a guide RNA backbone, wherein the construct comprises a cloning site positioned to allow the cloning of a nucleic acid sequence identical or complementary to a target sequence into the guide nucleic acid, e.g., guide RNA backbone.

[0530] Some embodiments of this disclosure provide cells comprising any of the base editors or complexes provided herein. In some embodiments, the cells comprise nucleotide constructs that encodes any of the base editors described herein. In some embodiments, the cells comprise any of the nucleotides or vectors provided herein. In some embodiments, a host cell is transiently or non-transiently transfected with one or more vectors described herein. In some embodiments, a cell is transfected as it naturally occurs in a subject. In some embodiments, a cell that is transfected is taken from a subject. In some embodiments, the cell is derived from cells taken from a subject, such as a cell line. A wide variety of cell lines for tissue culture are known in the art.

[0531] In some embodiments, a host cell is transiently or non-transiently transfected with one or more vectors described herein. In some embodiments, a cell is transfected as it naturally occurs in a subject. In some embodiments, a cell that is transfected is taken from a subject. In some embodiments, the cell is derived from cells taken from a subject, such as a cell line. A wide variety of cell lines for tissue culture are known in the art. Examples of cell lines include, but are not limited to, C8161, CCRF-CEM, MOLT, mIMCD-3, NHDF, HeLa-S3, Huh1, Huh4, Huh7, HUVEC, HASMC, HEKn, HEKa, MiaPaCell, Pancl, PC-3, TF1, CTLL-2, C1R, Rat6, CV1, RPTE, A10, T24, J82, A375, ARH-77, Calu1, SW480, SW620, SKOV3, SK-UT, CaCo2, P388D1, SEM-K2, WEHI-231, HB56, TIB55, Jurkat, J45.01, LRMB, Bcl-1, BC-3, IC21, DLD2, Raw264.7, NRK, NRK-52E, MRCS, MEF, Hep G2, HeLa B, HeLa T4, COS, COS-1, COS-6, COS-M6A, BS-C-1 monkey kidney epithelial, BALB/3T3 mouse embryo fibroblast, 3T3 Swiss, 3T3-L1, 132-d5 human fetal fibroblasts; 10.1 mouse fibroblasts, 293-T, 3T3, 721, 9L, A2780, A2780ADR, A2780cis, A 172, A20, A253, A431, A-549, ALC, B16, B35, BCP-1 cells, BEAS-2B, bEnd.3, BHK-21, BR 293. BxPC3. C3H-10T1/2, C6/36, Cal-27, CHO, CHO-7, CHO-IR, CHO-K1, CHO-K2, CHO-T, CHO Dhfr −/−, COR-L23, COR-L23/CPR, COR-L23/5010, COR-L23/R23, COS-7, COV-434, CML Ti, CMT, CT26, D17, DH82, DU145, DuCaP, EL4, EM2, EM3, EMT6/AR1, EMT6/AR10.0, FM3, H1299, H69, HB54, HB55, HCA2, HEK-293, HeLa, Hepalcic7, HL-60, HMEC, HT-29, Jurkat, JY cells, K562 cells, Ku812, KCL22, KG1, KYO1, LNCap, Ma-Mel 1-48, MC-38, MCF-7, MCF-10A, MDA-MB-231, MDA-MB-468, MDA-MB-435, MDCK II, MDCK 11, MOR/0.2R, MONO-MAC 6, MTD-1A, MyEnd, NCI-H69/CPR, NCI-H69/LX10, NCI-H69/LX20, NCI-H69/LX4, NIH-3T3, NALM-1, NW-145, OPCN/OPCT cell lines, Peer, PNT-1A/PNT 2, RenCa, RIN-5F, RMA/RMAS, Saos-2 cells, Sf-9, SkBr3, T2, T-47D, T84, THP1 cell line, U373, U87, U937, VCaP, Vero cells, WM39, WT-49, X63, YAC-1, YAR, and transgenic varieties thereof. Cell lines are available from a variety of sources known to those with skill in the art (see, e.g., the American Type Culture Collection (ATCC) (Manassus, Va.)). In some embodiments, a cell transfected with one or more vectors described herein is used to establish a new cell line comprising one or more vector-derived sequences. In some embodiments, a cell transiently transfected with the components of a CRISPR system as described herein (such as by transient transfection of one or more vectors, or transfection with RNA), and modified through the activity of a CRISPR complex, is used to establish a new cell line comprising cells containing the modification but lacking any other exogenous sequence. In some embodiments, cells transiently or non-transiently transfected with one or more vectors described herein, or cell lines derived from such cells are used in assessing one or more test compounds.

[0532] In some aspects, the present disclosure provides uses of any one of the base editors described herein and a guide RNA targeting this base editor to a target in the USH2A gene in the manufacture of a medicament. In some aspects, uses of any one of the base editors and guide RNAs described herein are provided in the manufacture of a kit for base editing, wherein the base editing comprises contacting the nucleic acid molecule with the base editor and guide RNA under conditions suitable for the substitution of the adenine (A) of a A:T nucleobase pair in the target with a guanine (G), or for the substitution of the cytosine (C) of a C:T nucleobase pair in the target with a thymine (T). In some embodiments, the step of contacting induces separation of the double-stranded DNA at a target region. In some embodiments, the step of contacting thereby comprises the nicking of one strand of the double-stranded DNA, wherein the one strand comprises an unmutated strand that comprises the T of the target A:T nucleobase pair, in adenine base editing. In some embodiments, the nicked strand comprises an unmutated strand that comprises the G of the target C:G nucleobase pair, in cytidine base editing.

[0533] For example, in some embodiments of the disclosed adenine base editing methods, the strand that includes the adenine (A) of the target T:A nucleobase pair opposite the strand containing the target thymine (T) that is being excised. This nicking result serves to direct mismatch repair machinery to the non-edited strand, ensuring that the modified nucleotide is not interpreted as a lesion by the cell's machinery. This nick may be created by the use of an nCas9.

[0534] In some embodiments of the described uses, the step of contacting is performed in vitro. In other embodiments, the step of contacting is performed in vivo. In some embodiments, the step of contacting is performed in a subject (e.g., a human subject or a non-human animal subject). In some embodiments, the step of contacting is performed in the inner ear of a subject. In some embodiments, the step of contacting is performed in the retina of a subject. In some embodiments, the step of contacting is performed in a cell, such as a human or non-human animal cell.

[0535] The present disclosure also provides uses of any one of the base editors or any one of the complexes of base editors and guide RNAs described herein as a medicament. The present disclosure also provides uses of the described pharmaceutical compositions or cells comprising, and vectors or rAAV particles encoding, any of the disclosed base editors or complexes herein as a medicament. In some embodiments, the medicament is for treatment of Usher syndrome (e.g., Usher syndrome, type 2A). In particular embodiments, the medicament is for treatment of autosomal recessive retinitis pigmentosa, vision loss, or hearing loss.

[0536] The function and advantage of these and other embodiments of the present invention will be more fully understood from the Examples below. The following Examples are intended to illustrate the benefits of the present invention and to describe particular embodiments, but are not intended to exemplify the full scope of the invention. Accordingly, it will be understood that the Examples are not meant to limit the scope of the invention.

### EXAMPLES

[0537] Data provided in the below examples describe the use of adenine base editors that are capable of catalyzing hydrolytic deamination of adenosine (forming inosine, which base pairs like guanine (G)) to treat Usher syndrome and retinitis pigmentosa by editing USH2A. Base editors comprising an adenosine deaminase (e.g., adenine base editors) have been described previously, for example, in PCT/US2017/045381 (published as WO 2018/027078); PCT/US2018/056146 (published as WO 2019/079347); PCT/2019/033848 (published as WO/2019/226953), and Gaudelli, N. M. et al. “Programmable base editing of A⋅T to G⋅C in genomic DNA without DNA cleavage.” Nature 551, 464-471 (2017). The first deoxyadenosine deaminases were evolved to accept DNA substrates and deaminate deoxyadenosine (dA) to deoxyinosine. As one example, evolution experiments were performed using the adenosine deaminase acting on tRNA (ADAT) from Escherichia coli (TadA, for tRNA adenosine deaminase A), to engineer adenosine deaminases that act on DNA. Briefly, ecTadA was covalently fused to a dCas9 domain, and libraries of this fusion were assembled containing mutations in the deaminase portion of the construct. Adenine base editors (ABEs) mediate the programmable conversion of A⋅T to G⋅C allows for base pair editing.

[0538] Base editing is a form of genome editing that enables the direct, irreversible conversion of one base pair to another at a target genomic locus without requiring double-stranded DNA breaks (DSBs), homology-directed repair (HDR) processes, or donor DNA templates. Compared with standard genome editing methods to introduce point mutations, base editing can proceed more efficiently, and with far fewer undesired products such as stochastic insertions or deletions (indels) or translocations.

[0539] Base editing capabilities have expanded through the development of base editors with different protospacer-adjacent motif (PAM) compatibilities, narrowed editing windows, enhanced DNA specificity, and small-molecule dependence. Fourth-generation base editors (BE4 and BE4-Gam) further improve C⋅G to T⋅A editing efficiency and product purity. Seventh-generation ABEs such as ABE7.10 convert A⋅T to G⋅C at a wide range of target genomic loci in human cells with a high efficiency, and with a very high degree of product purity (>99%), exceeding the typical performance characteristics of earlier generation base editors, e.g., BE3.

### Example 1

### Base Editing of USH2A In Vitro

[0540] First, candidates of USH2A mutation that could be converted by the disclosed adenine and cytidine base editors in silico were selected. To identify potential BE-treatable USH2A mutations, all previously-reported USH2A mutations were compiled using information from the LOVD and HMGD databases.^{1,2} This list was narrowed to those that were pathogenic or likely pathogenic, and to those that have been reported more than once in the LOVD database. Of the 1,260 mutations in USH2A extracted from these databases, 389 were both pathogenic and also were reported more than once (FIG. 2). Then, the sequence context of each mutation was analyzed. Existing base editors are limited to making transition mutations: C to T, T to C, A to G, or G to A, and are also limited by the presence of a PAM sequence within a certain editing window location. The editing window was set at from position 2 to 13 (a distance of 8 to 18 bases from the 3′ end of the PAM sequence) to select variants that could be edited by ABE or CBE variants (FIG. 2). The PAM variants included were NGG (spCas9WT), NGA (spCas9VQR), NG (spCas9-NG), NNGRRT (saCas9WT), and NNNRRT (saCas9KKH). 142 mutations met these constraints. 35 of these mutations were manually selected for editing experiments in human HEK293 cells. Many of these mutations are those that had been more frequently reported in humans. The editing efficiencies of base editors for these candidates were tested in HEK293 cells. It was found that many mutations of USH2A could be edited, with restoration of codon, by a cytidine base editor converting C (or G) to T (or A) (Table 4) or an adenine base editor converting A (or T) to G (or C) (Table 5).

[0541] Cell lines containing the mutant sequences that were selected as base editing targets are not readily available. USH2A mutations suitable for the disclosed base editors were selected in silico, and HEK293 stable cell lines which introduced 50 nucleobases that include the candidate mutations of the USH2A gene into the AAVS1 locus were made in order to confirm the efficacy of base editor. these candidate mutations in the USH2A gene are not present in a wildtype genome, and collections of patient-derived cell lines containing these mutations are not available. That is, stable HEK293 cells that express any one (but only one) of the candidate mutations cannot feasibly be prepared. Therefore, a stable cell line evaluation system was generated using an USH2A transgene containing a tandem array of target sites in order to efficiently test to editing efficacy on 35 targets. To introduce multiple mutant sequences into cells efficiently, two synthetic constructs were designed that are composed of tandem arrays of 51bp fragments, each containing a target mutation and adjacent sequence context. Universal primers were incorporated into the sequence to facilitate amplification of the targeted mutations sites by PCR (FIG. 4A). The two transgene constructs were named “TG1” and “TG2”, and altogether contained 36 mutation target sites to be tested, named “Al” through “A24”, “C1” through “C11”, and “Dnmtl” (FIGS. 3A and 3B). TG1 was used in conjuncation with editing of loci C1-C10 and Al-A10. TG1 was used in conjuncation with editing of loci A11-A24. (Under this naming convention, an USH2A target site labeled “A1” refers the first USH2A mutation locus intended to be edited by an A-base editor, and so on (see FIGS. 3A and 3B, “Exp#” column).)

[0542] AAVS1 is a safe harbor locus in the human genome, reported as a region that is not affected by gene knock-ins. In an AAVS1 knock-in system, CRISPR/Cas9-mediated homologous recombination causes knock-in of a transgene of choice into the AAVS/locus. Base editor vectors (CBE3.9, ABE7.10, and ABE8) and sgRNA vectors corresponding to each target were transfected into the AAVS/safe harbor knock-in USH2A mutation sequences or base editor vectors, sgRNA vectors and vectors including USH2A mutation sequences were transfected in HEK293 cells. Amplicons including mutations that had been amplified by PCR were read by Sanger sequencing or Amplicon sequencing to quantify editing efficacy.

[0543] A proof-of-concept study is performed to determine if base editors can introduce skipping of exons by mutating splice sites of the Ush2a gene in mouse organ of Corti (OC-k1) cells and mouse retina. Two sgRNAs are designed to target the SAS (AG) upstream the exon 12 in mouse Ush2a gene. Guide BE4 is used with the BE4-SpCas9-VRQR CBE editor to mutate an AG to AA; and guide ABE7.10 and ABE8e was used with ABE-xCas9-NG editor to convert AG to GG (FIG. 10B). The BE-Cas9 plasmid and the U6-sgRNA-CAG-EGFP were co-transfected into OC-k1 cells via lipofectamine 3000 or into mouse retina via sub-retinal injection and in vivo electroporation (FIG. 10E). Experiments are performed in triplicate. The EGFP-positive cells are isolated using fluorescence-activated cell sorting (FACS) and subjected to DNA and RNA. Immunocytochemistry may be subsequently performed: cells are stained overnight with Ush2a (1:4000) and acetylated-alpha tubulin (1:1000) antibodies, followed by labeling with fluorescent conjugated secondary antibodies.

### High Efficiency Base Editing of Splice Sites in Cells and Mouse Retina

[0544] Proof-of-concept studies were performed to determine if base editors (BE) can introduce skipping of exons by mutating splice sites of the Ush2a gene in mouse organ of Corti (OC-kl) cells and in vivo into mouse retina. Two sgRNAs were designed to target the SAS (AG) upstream the exon 12 in mouse Ush2a gene (FIG. 10A).

[0545] A guide sequence compatible with BE4 was used with the BE4-SpCas9-VRQR CBE editor to convert an AG to AA; and a guide sequence compatible with ABE7.10 and ABE8e was used with ABE-xCas9-NG editor to convert an AG to GG (FIG. 10B). The BE-Cas9 plasmid and the U6-sgRNA-CAG-EGFP were co-transfected into OC-k1 cells via Lipofectamine 3000®. And the BE-Cas9 plasmid and the U6-sgRNA-CAG-EGFP were co-transfected into mouse retina via subretinal injection and in vivo electroporation (FIG. 10C). Three experiments for each base editor were performed. The EGFP-positive cells were isolated using fluorescence-activated cell sorting (FACS) and subjected to DNA and RNA.

[0546] Genomic DNA was extracted and a ˜265 bp portion of Ush2a centered on the target splice site was amplified by PCR. The amplicon from each sample was sequenced using Sanger sequencing and next-generation sequencing (NGS). The base editing rate was determined based on the NGS reads that were processed through CRISPResso, a public software that provides analyses of genome editing outcomes from deep sequencing data. See Clement et al., Nat Biotechnol. 2019 Mar; 37(3):224-226, herein incorporated by reference.

[0547] EditR analysis was used to quantify the editing efficiency. The editing rate of BE4 at the target base “C4” position was 29% and 52% in OC-k1 cells and retina, respectively. For ABE7.10 editing at “A5” position, the editing rate is 20% and 6% in OC-k1 cells and retina, respectively. ABE8.0 in mouse retina resulted in a 42% editing rate, 6-fold more efficient than ABE7.10 (FIG. 10D). Bystander editing of BE4 at other cytosine positions was at minimum rate (2%) if these edits are all considered (FIG. 10E).

[0548] To determine if the sequence alteration at the SAS of Ush2a exon 12 could lead to the skipping of the exon, RNA was extracted from EGFP-positive and negative OC-k1, retinal cells were dissociated, and RT-PCR was performed using primers flanking the adjacent upstream and downstream exon 11 and 13. The expected size of the RT-PCR product in a Southern blot would be 920 bp if exon 12 is included, or 290 bp if exon 12 is deleted. A 278 bp band was detected for both BE4-sgRNA1- and ABE-sgRNA2-treated OC-k1 and in mouse retina (FIG. 10F). This band, detected in all editing cells, matches the expected size if exon 12 is skipped from the transcripts.

[0549] Sanger sequencing of the 278 bp band revealed that exons 11 and 13 were spliced correctly (FIG. 10G). Notably, along with the 278 bp band, several smaller sized bands were detected in BE4-SpCas9-WT treated cells, probably resulting from alternative splicing events. Thorough analysis of the transcript events after base editing are being conducted to better understand the consequences of BE-mediated exon skipping. Overall, this proof-of-concept study demonstrates a highly efficient base editing rate at the splice site with either CBE or ABE editors both in vitro and in vivo, consistent with published values for base editing. More promisingly, it demonstrated that the mutated splice site induced by base editing could lead to an exon-skipping event in the cells and retina.

### Methods

### In Silico Selection of Potentially Editable Human USH2A Mutations

[0550] The USH2A mutation information was downloaded from LOVD (https://databases.lovd.nl/shared/genes/USH2A) and HMGD (http://www.hgmd.cf.ac.uk/ac/index.php). Likely pathogenic and pathologic mutations in these databases (“pathogenic”, “UV3”, and “UV4” in LOVD; “DM” in HGMD) were selected, with mutations for which only 1 case was reported in LOVD excluded. The editing window was set at from position 2 to 13 (a distance of 8 to 18 bases from the 3 ′ end of the PAM sequence) to select variants that could be edited by an adenine base editor (ABE) or cytosine base editor (CBE). The base editing PAM variants used were NGG, NGA, NG, NNGRRT, and NNNRRT.

### Plasmid Vector Construction

[0551] Transgenes including tandem arrays of USH2A mutations (FIGS. 18A-18B) were synthesized by integrated DNA Technologies were inserted into the AsCl/MluI cut site in pAAVS1-puro-DNR plasmid (Origene). The AAVS1 genomic locus was selected for the transgene integration site due availability of existing reagents targeting this locus, rather than any link to adenovirus-associated virus (AAV) biology per se.

[0552] Guide RNAs (sgRNAs) were designed to target human USH2A mutation (Table 10). Oligonucleotides were synthesized by Integrated DNA Technologies (Coralville, IA), annealed, and ligated into BsmBI digested BPK1520 (Addgene #65777) for SpCas9 and BPK2660 (Addgene #70709) for SaCas9 in which CAG-EGFP was inserted in HindIII cut site.

[0553] The expression plasmid of the cytosine base editor, CBE3.9max3, was used to make C-to-T and G-to-A transitions. PAM specificity variants included SpCas9-WT, SpCas9-VQR, and SaCas9-KKH. The following adenine base editor expression plasmids were used for mutation A-to-G to T-to-C transitions: ABE7.10 SpCas9WT (Addgene #112095), ABE7.10 SpCas9VQR (Addgene #119811), ABE7.10 SpCas9NG (Addgene #124163), ABE7.10 SaKKH (Addgene #119815), ABE8 SpCas9WT (Addgene #138489), ABE8 SpCas9NG (Addgene #138491). For each mutation target site, the appropriate plasmid was used from the lists above, based on the editor type and PAM type.

[0554] The full-length wildtype human USH2A plasmid was driven by a CMV promoter in a pUC57 backbone.? The large plasmid size (19.1 kb) makes mutagenesis by PCR inefficient. Human USH2A mutant plasmids were constructed from the wildtype hUSH2A plasmid using Gibson assembly. Briefly, the wt USH2A backbone was digested with BlpI (Al), SacII (A7), PsHAI and NotI (A12), PshAI and AvrII (A15) which were the nearest single cutters to each mutation. Two PCR fragments for each mutation were amplified from the WT vector with overhangs and then were assembled together with the cut backbone using Gibson assembly. Primers used for these PCRs were listed in Table 12.

### Establishment of Stable Cell Lines Containing USH2A Mutations

[0555] HEK293 cell lines containing USH2A mutant target sequences in AAVS1 were established using the pAAVS1-Puro-DNR plasmid vector (Origene) and the pCas-guide plasmid vector (Origene). The transgenes (TG1, TG2) 51 bp gene fragments, each containing a USH2A mutation, connected in tandem. Universal primers were interspersed among the fragments for PCR amplification of edited sites for quantification. Synthetic oligos (Integrated DNA Technologies) containing the transgene sequences were cloned into the Ascl-MluI cloning site of the pAAVS1-Puro-DNR plasmid vector. 8x 10⁵ HEK293 cells were seeded into 6-well cell culture plates, transfected with 1.6 μg of pAAVS1-puro-DNR and 1.6 μg pCas-guide plasmid vector using 8 μl of Lipofectamine 2000, and cultured in puromycin at final concentration of 1.5 μg/mL for 21 days after transfection. Single cells were expanded into colonies by the limiting dilution method. Insertion of the transgene in the desired AAVS1 location was assayed using PCR with specific primers (AAVS1F and AAVS1R (Table 11) in the donor vector and another primer located in AAVS1 locus.

[0556] For the establishment of a HEK293 cell line with the site Al mutation (USH2A c.11864G>A) at the endogenous USH2A locus, a donor vector with the c.11864G>A template, an sgRNA-expressing plasmid (with guide spacer AGGGTTCAGTGGAGAGTCTG (SEQ ID NO: 162)) and a Cas9 expression plasmid were transfected into HEK293 cells. Single clones containing the mutation sequence without indels were selected by Sanger sequencing. As a result, a clone in which the mutation was contained in all three (triploid) chromosomes was established (FIG. 15A). Plasmid PX459 (Addgene #48138) containing SpCas9-2A-puro was used for co-transfections with 127 bp ssODN; TCAACAGAACTGAATGAGCACTCGTGGCTTGAGCCCAAGGAGCTGGAAAATCTT GAGGTGGAGCTTCCAGAGTTTGTGTTAATGACTACAGACTCTCCACTGAACCCTT GGAGTTACAGGCTCTGAC (SEQ ID NO: 163) (Integrated DNA Technologies). After single cell cloning, the sequence around mutation site and around the edges of the homology regions was checked by Sanger sequencing and was 100% correct. USH2A cDNA expression constructs restore ciliogenesis in Ush2a null cells

[0557] Human USH2A exon 13, 17, 24, 28, 43, 45, 50, 54-55, 56, and 62 deleted (hUSH2A-ΔEx13, ΔEx17, ΔEx24, ΔEx28, ΔEx43, ΔEx45, ΔEx50, ΔEx54-55, ΔEx56 and ΔEx62 plasmids were constructed from the wild type hUSH2A plasmid. For example, to create USH2A-AEx13, the wt hUSH2A backbone was digested with PsHAI and AvrII, which were the nearest single endonuclease sites to exon 13, to remove the sequence between exon 12 and 25. PCR fragments from exons 11-12 (234 bp) and 14-26 (2377 bp) were amplified from the WT vector with overhangs, and then assembled together with the cut backbone using Gibson assembly. A similar approach was used to construct the other plasmids encoding hUSH2A with an excised exon (“deletion plasmids”).

### Base Editing Evaluation by Transfection and Genomic DNA Preparation

[0558] 1.5×10⁵ HEK293 cells were seeded into 48-well cell culture plates, transfected with 240 ng of base editor vector (BE3.9, ABE7.10 or ABE8) and 80 ng sgRNA plasmid vector, and 0.66 μl of Lipofectamine 2000, and collected day 6 after transfection. To obtain genomic DNA, cells were washed with PBS and lysed with DNA lysis buffer (50 mM Tris HCl pH 7.5, 0.05% SDS, and 5μg/mL proteinase K). The genomic DNA mixture was incubated at 37° C. for 1 h 30min, followed by an 80° C. enzyme denaturation step for 30 min.

### Immunocytochemistry

[0559] OC-k1 cells were grown on coverslips and fixed with 1% freshly prepared paraformaldehyde (PFA) for 20 seconds. Samples were blocked in 1% bovine serum albumin and 10% goat serum in PBS (pH 7.4). Separately, in each reaction, each deletion plasmid along with SpCas9-2A-GFP plasmids at 1:1 molar ratio were co-transfected into ˜80% confluence OC-k1 cells in 6-well plate using Lipofectamine 3000 (Thermo Fisher Scientific). The cells were incubated for 48 hours. Cells were stained overnight with Ush2a (1:4000) and Acetylated-alpha tubulin (1:1000) antibodies, followed by labeling with fluorescent conjugated secondary antibodies. Images were taken with a fluorescent microscope (Eclipse Ti, Nikon, Tokyo, Japan). Cilia length was quantified by measure the acetylated tubulin signal using a freehand line tool and a length measurement option in the Image J software (National Institute of Mental Health, Md., USA).

### Example 2

### Editing in Human Cells

[0560] The base editing results between a plasmid-based target introduced by transient transfection versus a stably integrated transgene target incorporated into the AAVS1 genomic locus was compared in HEK293 cells, as shown in FIG. 12A. Stable cell lines with a transgene integrated into the AAVS1 locus were generated using the CRISPR/Cas9 system (FIG. 4B), and integration of the target transgene into the AAVS1 region was confirmed. After transient transfection of base editing reagents (an enzyme plasmid and a separate guide plasmid), each target sequence was amplified by PCR followed by Sanger sequencing to quantify the editing efficiency of the target base, as shown in FIG. 12A. The results showed a high correlation between plasmid-based and transgene-based editing for transgene 1, but not for transgene 2 (FIGS. 12B-12D). In parallel, a

[0561] Next, two different methods were evaluated for measuring editing efficiency (target base conversion rate), NGS sequencing versus Sanger sequencing. PCR products amplified using universal primers corresponding to each target were subjected to either NGS amplicon sequencing or Sanger sequencing analysis to compare the editing efficiency of mutation sites. These two data sets showed a high correlation (r²=0.96, FIG. 12E), validating Sanger sequencing as an accurate method for evaluating editing efficacies.

[0562] To estimate how these results derived from the HEK293 cells line might compare to editing in the retina in vivo, data from the editing of the genomic transgene in HEK293 cells to the data was compared to editing data in mouse retina in vivo after subretinal AAV delivery of a split-intein formulation of BE3.9, as previously published in Levy et al., Nat Biomed Eng. 2020 Jan; 4(1):97-110. The target cytosine and neighboring (bystander) cytosines in the protospacer sequence of Dnrntl showed a similar editing pattern after subretinal administration as was seen in the transgene experiment (FIG. 19; see also FIGS. 5A-5C). These results demonstrate that the editing efficiency and the editing pattern of base editing in the HEK293 cell line experiments presented in this study likely reflect those in the endogenous genome of photoreceptors in vivo, at least as indicated by results from the Dnrntl test locus. Dnmt1 acts redundantly with Dnmt3a in the mammalian brain and is therefore well-suited for proof-of-concept studies. As previously described, samples were prepared and Sanger sequencing data was received (see Pendse et al., 2020). Mouse retina were administered fifty BE3.9 vectors and sgRNA vectors corresponding to each target at the many targeted sites following Dnrntl knock-in of USH2A mutation sequences. Amplicons including mutations that amplified by PCR were read by Sanger to quantify editing efficacy.

### Evaluation of Base Editing Efficiency on USH2A Target Mutations

[0563] Due to the low correlation of editing efficiency between editing of transiently-transfected plasmids and stably integrated transgenes in one of the two transgenic constructs (TG2, see above), the remaining experiments were performed using a stably integrated transgene. Each transgene is located in the autosomal genome, like the eventual therapeutic targets in photoceptors. In each of the 11 target sites with an intended C-to-T or G-to-A target conversion (sites C1 to C11), editing was evaluated using three different PAM variants of the C-base editor CBE3.9max, using Sanger sequencing as a readout. The results showed CBE editing efficiencies ranging from 59.5±8.4% (site C1) to 1.9±1.9% (site C10) (FIG. 6A). The editing window was rather wide, similar to previous reports4, with editing observed of additional nearby, bystander cytosines in addition to the target cytosine (FIG. 13A). Next, the editing efficacies of four different PAM variants of two A-base editors, ABE 7.10 and ABE 8, were examined on 24 target sites with an A-to-G or G-to-A intended target (FIG. 6B). ABE 7.10 showed editing efficiencies from 69.9 ±0.7 (site A5) to 0% (sites A6, A10, and A14). ABE 8 showed editing efficacies from 89.4±1.3% (site A1) to 0.20±0.35% (site A10). Compared with CBE, ABE tended to show greater variability as to whether a particular editing target showed efficient editing or not. As previously reported5, ABE8 was more efficient and had a wider editing window than ABE 7.10 (FIGS. 13A-13C). Efficiency also varied by the Cas9 PAM variant type used. SpCas9WT tended to have the highest editing efficiency and SaCas9-KKH tended to have the lowest (FIGS. 20A-20B).

[0564] To determine which target sites are most suitable for treatment with BE, with an expected phenotypic recovery at the amino acid level, the effects of bystander editing were evaluated using NGS sequencing and analysis of individual reads. The metric “Productive edits” were defined as reads in which the intended amino acid change was created but no other amino acids were changed (FIG. 14A). This allows for synonymous mutations but does not allow for missense mutations, nonsense mutations, or indels. The fraction of productive edits, compared to total edits, was very low for sites C2, C3, C4, C5, and site A5, whereas the fraction of productive edits was high for sites C1, A1, A7 and A8 (FIG. 14B). The indel ratio in each target was also calculated from the results of NGS amplicon sequencing, since the indel ratio was also an important parameter for evaluation as a therapeutic target. The indel ratio for CBE3.9, ABE 7.10, and ABE 8 editors ranged from 0.54-16.53%, 0-2.74%, and 0.07-1.77%, respectively (FIG. 4b). While the overall trend in editing efficacy among editors was ABE8 >CBE3.9 >ABE7.10, the trend for indel creation was CBE3.9 >ABE7.10 and ABE8 (FIGS. 21C-21D). Thus, ABE8 had the most favorable combination of editing efficiency and low production of indels. Overall, these results demonstrate that multiple USH2A mutations show empirical evidence of high productive edits with low indels, making them candidates for continued evaluation as therapeutic targets by base editing.

[0565] As shown in FIGS. 14A and 14B, the off-target editing metric “productive editing” (productive edit %), which is calculated as the mean rate at which the contacting of the target sequence with a base editor results in a product that does not contain an amino acid mutation. Nucleotide site A5, which corresponds to nucleotide position 14803, is shown as an example DNA target. The “reference strand” (SEQ ID NO: 164) represents a wild-type target strand, and the sequences below represent five different base editing outcomes, as read by Amplicon sequencing analysis. The next strand (SEQ ID NO: 165) contains the intended A→G base edit at position 14803. The third strand (SEQ ID NO: 166) contains the intended base edit but also contains an unintended A→G mutation at position 14806, which results in a Y→F amino acid substitution. The fourth strand is wild-type (no edits). Thus, the second and fourth strands are productive, while the third strand represents a non-productive edit. FIG. 14B shows the editing efficiency (% target conversion) and productive editing % at each mutation of USH2A for the base editors BE3.9, ABE 7.10, and ABE8e.

[0566] Thus, it is feasible that these USH2A-specific reagents will be similarly active in the retina, like the high efficiency shown explicitly for the DNMT1 target in the mouse retina achieved using a split-intein editor.

### Evaluation of Off-Target Effects of Base Editing for USH2A Mutations

[0567] The specificity of base editing depends on how efficiently the sgRNA can recognize other, off-target sites in the genome. Sites C6 and A1 were selected for further evaluation, due to their high base editing efficiency. Off-target effects were examined. The CRISPOR in silico prediction algorithm (Haeussler et al., 2016) was used to identify 10 sequences with a high Mit-off-target score for each target (FIGS. 8A and 9A). After editing, the off-target loci were amplified by PCR and quantified by Sanger sequencing. Off-target editing rates were generally low, but the highest off-target edit with the C6 editing reagents was 19.35%, while the highest off-target editing rate for A1 was 74.50% (FIGS. 8B and 9B). There was little correlation between the Mit-off-target score and editing efficiency (FIG. 22). Because the two loci with high off-target editing efficiencies were located in an intronic region (C6) or in an intergenic region (A1), they are less likely to affect gene expression level. More comprehensive tests for off-target editing⁶ (see Tsai, S. Q. et al. Nat Methods 14, 607-614, (2017) and International Application No. PCT/US2020/624628, filed Nov. 25, 2020, each of which is incorporated by reference herein), as well as whether any off-target edits actually have a deleterious effect on photoreceptor health, can be considered for future work. These results suggest that sites C6 and A1 are promising therapeutic targets for base editing.

[0568] Additionally, it was demonstrated that the base editing reagents described above (at the DNA level) also works to restore protein expression in mutant USH2A cDNAs (FIGS. 16A and 16B). Delivery of base editing reagents to the retina may be accomplished by a number of methods, including viral or nonviral delivery. Adeno-associated virus is a high effective gene therapy delivery vehicle but with limited cargo capacity of ˜4.7kb of DNA. The evaluated split intein-editors are small enough to by carried by AAV viral particle vehicles.

[0569] A split intein ABE8 editor and a split intein ABE8(V106W) editor was evaluated, in conjunction with guide RNAs for sites A3, A7, A10, All, or A13 in the USH2A gene to demonstrate that reagents whose DNA lengths are within the 4.7kb limit are capable of successfully editing sites A3 and A7 with high efficiency, and with smaller efficiencies for sites A10, All, A13. An ABE8e editor that was not split into two inteins was also evaluated as a control. Sites A3, A7, A10 indicate where the editing target base is located in the protospacer sequence and correspond to the numbers above the bar graph of FIG. 16B. A3 is the site of c.11864G>A (site A1). A7 and A10 are the bystander editing sites.

Restoration of Full Length USH2A Protein with Base Editing

[0570] The experiments above were performed on transgenes integrated into the AAVS1 genomic locus, using a sequence context of 51 bp from each mutation locus. To test whether base editing has the same effect at the endogenous, full-length USH2A genomic locus, a mutant cell line with a homozygous site Al mutation (USH2A c.11864G>A p.Trp3955*) was generated (FIG. 15A). (As used in this Example, the term “homozygous,” means that all three of the triploid chromosomes in the HEK cell genome were mutagenized.) Editing of the A1 site in the endogenous Ush2a locus using ABE7.10 and ABE8 showed an editing efficiency of 23.0±1.6% and 74.8 ±0.5% respectively (FIG. 15B). These results are very similar to those obtained from editing the synthetic construct containing the Al site at the AAVS1 locus, which showed 29.2±0.5% editing with ABE7.10 and 89.4±1.3% editing with ABE8. Using ABE7.10 to edit the same site in a transfected plasmid showed a similar but slightly lower editing efficiency of 18.2±0.2%.

[0571] Next, the efficiency of restoration of function of mutant USH2A protein expression following base editing of nonsense mutations at the A1, A7, A12 and A15 sites, which were edited at high efficiency in the above experiments, was examined. A wildtype USH2A expression plasmid ⁷ was modified by mutagenesis to produce the four individual USH2A mutants listed. After co-transfection of USH2A expression vector with ABE and sgRNA plasmids in HEK293 cells, USH2A expression was assessed by immunostaining using an antibody to the C-terminal portion (exon 70-72) of USH2A. No significant immunostaining was detected from any of the four mutant proteins (FIG. 15C). Co-transfection of base editing and sgRNA plasmids fully restored USH2A expression to the same level as wildtype for all four mutants tested (FIGS. 15C and 15D). These results demonstrate that base editing can restore wildtype USH2A protein expression levels for these mutations.

[0572] The below tables illustrate the editing efficiencies of exemplary CBE-gRNA combinations in HEK293 (Table 4) and exemplary ABE-gRNA combinations in HEK293 (Table 5) and WERI-RB human retinoblastoma cells (Table 6), in which USH2A mutations were knocked in by transfection.

### Discussion

[0573] This study independently demonstrates that ABE8 shows the most favorable characteristics of the base editors tested in this dataset, with high efficiency and low indels. The indel rate was even lower than ABE7.10, even in the context of ABE8's higher editing efficiency. CBE3.9 has a wide editing window, creating “bystander” edits in nearby Cs. While a wide editing window this is a potential disadvantage for mutation reversion, it is an advantage for strategies such as modifying splice sites to promote exon skipping.

[0574] The high accuracy of the quantification of Sanger sequencing was surprising, relative to NGS-based amplicon sequencing (r²=0.96, FIG. 12E), which is a gold standard for quantifying the fraction of of bases that are converted. These reliable results for S anger-based quantification were achieved in the context of low background in the Sanger sequencing traces. The possible effects of using noisy sequencing traces were not formally evaluated.

[0575] The BE-HIVE AI model provided in PCT/US2021/016924, filed Feb. 5, 2021, which is incorporated herein by reference, offers an opportunity to test how the predictions of the model hold up empirically. In general, an excellent correlation was shown between the model predictions and the empirical editing efficiency for some base editors, but not others (FIGS. 21A-21D). For example, two newly-created editors with the KKH PAM variant were not highly active at any sites (FIG. 20B). These experiments identified that these editors need to be re-engineered before further use and highlight but concrete example of how empirical testing is needed for reagents that were not tested in existing large datasets like BE-HIVE.

[0576] In summary, for testing a single target, any of the approaches used (editing of plasmids, editing of a stable transgene fragment, editing of a mutated genomic locus) would provide valid empirical data. Editing of a transfected plasmid editing is the most technically convenient, in cell types that are transfectable. Establishing a single-copy transgene in a particular locus (AAVS) was similar in complexity to creating a single mutant site in the endogenous gene, both using Cas9-based techniques with homology or repair templates, respectively. Faster methods of transgenesis exist, like lentiviral transduction with antibiotic selection or the piggyBac transposase system, though it remains to be seen how the effects of genomic locus and multiple copies might influence editing efficiencies.

[0577] For moderate numbers of potential targets to validate, like the 33 targets of Example 2, transgenesis of a target array has an advantage over engineering each endogenous genomic locus separately, because many target fragments can be concatenated into a single transgene. This study using two different transgenes as additional targets were selected, but in practice one large transgene would have been equally technically feasible. The disadvantage of editing concatenated small gene fragments into a transgene is that testing restoration of protein function is not possible, though this can be done as a separate step for top candidates (FIGS. 15A-15D).

[0578] For large numbers of potential targets, library approaches become more feasible. Innovative approaches include delivering editors and targets together using lentivirus (BE-Hive) or using recombinase-based methods, such as those disclosed in Matreyek et al., Nucleic Acids Research, Volume 48, Issue 1 (2020), incorporated by reference herein, to create multiple target sites via genome engineering. Synthesizing, cloning, and deconvoluting library results is more complex and expensive than the techniques used in this study (Sanger sequencing and simple amplicon sequencing), but provide orders of magnitude more data.

TABLE 4
Cystosine base editing for reversion of particular mutations in USH2A IN HEK29 3
cells. This table shows guide sequence-base editor combinations that show high editing
efficiency. Top to bottom, the sequences in this table correspond to SEQ ID NOs: 1-11. See
FIGS. 3A and 3B for additional information about the loci described in this table.

| | | | | BE4max | | | | Sequence |
|---|---|---|---|---|---|---|---|---|
| Site | | | Amino Acid | Editing | | | editing | (SEQ ID NOs: |
| # | dnSNP | DNA | Substitution | rate (%) | PAM | Cas9 var | window | 1-11) |
| site | rs786200928 | c.7595- | p.(Lys2532Thrfs*) | 59.47 | NGG | SpCas9WT | C7 | GCCTTTTCTTAAAG |
| C1 | | 2144A > G | | | | | | ATGATCTCTTACCT |
| | | | | | | | | TGGGAAAGGAGAG |
| | | | | | | | | GTGTTCAATT |
| site | rs397518003 | c.1841- | p.(Gly614Aspfs*6) | 52.07 | NGG | SpCas9WT | C9 | CCTTGCACAGCTCA |
| C2 | | 2A > G | | | | | | CAGTTCCTTCCCGC |
| | | | | | | | | ATCAGGGAAAGGT |
| | | | | | | | | TATGCATTAT |
| site | rs397517978 | c.12067- | P-? | 37.12 | NGG | SpCas9WT | C6 | CAGGTGGGCTTGA |
| C3 | | 2A > G | | | | | | TGGCTTGTTCCCCG |
| | | | | | | | | TAAGAAAATTAAC |
| | | | | | | | | AGGTTAAGTTG |
| site | rs397518039 | c.8559- | p.(Tyr2854_Arg289 | 48.60 | NGG | SpCas9WT | C4 | ATTTTACGTCTCAG |
| C4 | | 2A > G | 4del) | | | | | AAGCTCATATCCA |
| | | | | | | | | AAGCAAAAGACAA |
| | | | | | | | | GCAGGAACATC |
| site | rs111033263 | c.9799T > C | p.(Cys3267Arg) | 37.84 | NNGRRT | SaCas9 WT | C13 | GGTTTCTGTTGGCA |
| C5 | | | | | | | | TTGGTGATTCCCGC |
| | | | | | | | | TGTGGCAGAATGC |
| | | | | | | | | CGTACTCCAC |
| site | rs775177930 | c.3368A > G | p.(Tyr1123Cys) | 41.70 | NGG | SpCas9WT | C4 | ATGCACATTGGTG |
| C6 | | | | | | | | GTCTCAATGTAAC |
| | | | | | | | | AGGAATATTTGGT |
| | | | | | | | | ATATGGTAACAG |
| site | rs111033273 | c.1606T > C | p.(Cys536Arg) | 55.60 | NGA | SpCas9 | C5 | CGACACAACAAGC |
| C7 | | | | | | VRQR | | CAGCCATATAGAC |
| | | | | | | | | GCCTCTGCTCCCAG |
| | | | | | | | | GAGAGCTTCAC |
| site | — | c.4325T > C | p.(Phe1442Ser) | 22.14 | NNNRRT | SaCas9 | C7 | CTGAAACCTTATA |
| C7 | | | | | | KKH | | GGATATATGAGTC |
| | | | | | | | | TACTATTACTCTCT |
| | | | | | | | | GCAATTCAGTT |
| site | rs111033264 | c.10561T > C | p.(Trp3521Arg) | 13.20 | NNNRRT | SaCas9 | C8 | TCTTGAAGATACA |
| C9 | | | | | | KKH | | ATTGTCTTAAACCG |
| | | | | | | | | GAGAAAACCTATA |
| | | | | | | | | CAATCAAATGg |
| site | — | c.2296T > C | p.(Cys766Arg) | 1.71 | NGA | SpCas9VRQ | C7 | ATTCTGCAATCCTC |
| C10 | | | | | | R | | ACTCTGGGCAGCG |
| | | | | | | | | TGAGTGCAAAAAA |
| | | | | | | | | GAAGCCAAAGG |
| site | rs201657446 | c.7595- | p.(Pro2533Asnfs*5) | 29.95 | NGA | SpCas9VRQ | C3 | CGGAGGAACTACA |
| C11 | | 3C > G | | | | R | | GGTCCAGGTTCTCT |
| | | | | | | | | AAAGTAAAATAAA |
| | | | | | | | | TCCAGAAAGTC |

TABLE 5
Adenine base editing for reversion of particular mutations in USH2A in HEK293
cells. This table shows guide sequence-base editor combinations that show high editing
efficiency. Top to bottom, the sequences in this table correspond to SEQ ID NOs: 12-35. See
FIGS. 3A and 3B for additional information about the loci described in this table.

| | | | | ABE7.10 | ABESe | | | | Sequence |
|---|---|---|---|---|---|---|---|---|---|
| Exp | | | Amino Acid | Editing | Editing | | | editing | (SEQ ID NOs: 12- |
| # | dnSNP | DNA | Substitution | rate(%) | rate(%) | PAM | Cas9 var | window | 35) |
| site | rs111033364 | c.11864G > A | p.(Trp3955*) | 29.22 | 89.45 | NGG | SpCas9WT | A3 | TCCAAGGGTTCA |
| A1 | | | | | | | | | GTGGAGAGTCTG |
| | | | | | | | | | TAGTCATTAACA |
| | | | | | | | | | CAAACTCTGGAA |
| | | | | | | | | | GCT |
| site | rs202175091 | c.10712C > T | p.(Thr3571Met) | 16.94 | 65.13 | NGA | SpCas9 | A6 | GCTACTGGTGGC |
| A2 | | | | | | | VRQR | | ACAGCCAGCAA |
| | | | | | | | | | CCATGCAAGCTT |
| | | | | | | | | | TCAGCTGATATG |
| | | | | | | | | | AATA |
| site | rs111033334 | c.2209C > T | p.(Arg737*) | 1.26 | 1.85 | NNNRRT | SaCas9 | A6 | TCACATCCAACA |
| A3 | | | | | | | KKH | | TCATTAAAGCTT |
| | | | | | | | | | CAGAGAAATTTA |
| | | | | | | | | | AATCCAAAATTG |
| | | | | | | | | | CAA |
| site | rs199605265 | c.12575G > A | p.(Arg4192His) | 29.14 | 75.82 | NGA | SpCas9VR | A7 | AAAATAATTCGC |
| A4 | | | | | | | QR | | TATGAAGTGATT |
| | | | | | | | | | CACAGATGCTTC |
| | | | | | | | | | GAGGGAAAAGC |
| | | | | | | | | | TTGG |
| site | rs146733615 | c.14803C > T | p.(Arg4935*) | 69.83 | 82.85 | NGG | SpCas9WT | A5 | TTGCTGTCCACC |
| A5 | | | | | | | | | GAAAATGGGGC |
| | | | | | | | | | TCAGTACTGAGG |
| | | | | | | | | | CACTGTGGGGAG |
| | | | | | | | | | AAAG |
| site | rs199679165 | c.4645C > T | p.(Arg1549*) | 0.00 | 3.93 | NNNRRT | SaCas9 | A4 | ATCAAACCTTCA |
| A6 | | | | | | | KKH | | GGCACTTTTGTT |
| | | | | | | | | | CAAAAGCTGGCC |
| | | | | | | | | | TTAATGCCTGGT |
| | | | | | | | | | AAG |
| site | rs772808534 | c.100C > T | p.(Arg34*) | 36.66 | 81.60 | NGA | SpCas9 | A8 | TTCTCCAGCCTT |
| A7 | | | | | | | VRQR | | GGGAAAAGACC |
| | | | | | | | | | TCATGACTCAGT |
| | | | | | | | | | CAAGGATATTGA |
| | | | | | | | | | AGCA |
| site | rs201238640 | c.13274C > T | p.(Thr4425Met) | 37.61 | 82.56 | NGA | SpCas9 | A7 | CACACTAGCTGT |
| A8 | | | | | | | VRQR | | GCAACCTCCATT |
| | | | | | | | | | CATGCAGGCTAC |
| | | | | | | | | | AAGGGAGAAGT |
| | | | | | | | | | TATA |
| site | rs753330544 | c.13316C > T | p.(Thr4439Ile) | 25.64 | 38.10 | NGA | SpCas9 | A7 | CATGTTCTCTGG |
| A9 | | | | | | | VRQR | | CAGGGCCTCCAT |
| | | | | | | | | | TATCCAGGCAGA |
| | | | | | | | | | TTTTGACACACT |
| | | | | | | | | | AGC |
| site | rs111033280 | c.802G > A | p.(Gly268Arg) | 0.00 | 0.20 | NNNRRT | SaCas9 | A5 | atttgcagGTTTA |
| A10 | | | | | | | KKH | | GAGCAGTTTGTCA |
| | | | | | | | | | GAAGAATGCAAG |
| | | | | | | | | | ATTTTCGATTAT |
| | | | | | | | | | A |
| site | rs397517963 | c.1000C > T | p.(Arg334Trp) | 0.63 | 8.09 | NG | SpCas9-NG | A5 | AGAGGATGGGC |
| A11 | | | | | | | | | TTCAGGATTCAA |
| | | | | | | | | | CCATGACACTCT |
| | | | | | | | | | ATTATCAGCTGT |
| | | | | | | | | | GTCT |
| site | rs534534437 | c.1876C > T | p.(Arg626*) | 0.18 | 40.27 | NG | SpCas9-NG | A6 | GCCGAAGGATCT |
| A12 | | | | | | | | | GCACCAACTTGT |
| | | | | | | | | | CAGAAAAAGTA |
| | | | | | | | | | ATCCTTGCACAG |
| | | | | | | | | | CTCA |
| site | — | c.2440C > T | p.(Gln814*) | 1.51 | 6.35 | NGA | SpCas9VR | A3 | TCAACATTGGGC |
| A13 | | | | | | | QR | | TTGCAGATGCAC |
| | | | | | | | | | TACCCTGTCTTA |
| | | | | | | | | | GCATTACAGACA |
| | | | | | | | | | GTC |
| site | rs13947 | c.2797C > T | p.(Gln933*) | 0.00 | 10.39 | NGA | SpCas9VR | A4 | ATTTCTTTCTTAC |
| A14 | 37087 | | | | | | QR | | CTGGTTGACACT |
| | | | | | | | | | AATTACACCTTC |
| | | | | | | | | | TTCCTTGACGAT |
| | | | | | | | | | TA |
| site | rs764797292 | c.3883C > T | p.(Arg1295*) | 4.40 | 49.47 | NGG | SpCas9WT | A6 | AGCCAACCACTG |
| A15 | | | | | | | | | CTCTGAAAAACT |
| | | | | | | | | | CAACTTTCCTCA |
| | | | | | | | | | GATGTGGTTTCT |
| | | | | | | | | | TTA |
| site | rs754768875 | c.4957C > T | p.(Arg1653*) | 2.26 | 12.39 | NGA | SpCas9VR | A7 | TCCTTCCTGAGG |
| A16 | | | | | | | QR | | ATGGTATAACTT |
| | | | | | | | | | CACGGGAGCCCT |
| | | | | | | | | | CCCAGAAAGACT |
| | | | | | | | | | CCT |
| site | rs375668376 | c.5581G > A | p.(Gly1861Ser) | 10.56 | 54.03 | NG | SpCas9-NG | A7 | cccttactatttg |
| A17 | | | | | | | | | ctagGTTTCGGTA |
| | | | | | | | | | GTTGCATGAAGGA |
| | | | | | | | | | TGTTAAATTTAC |
| site | rs200712760 | c.8167C > T | p.(Arg2723*) | 6.81 | 32.69 | NGG | SpCas9WT | A9 | ACAGGTGGCTGC |
| A18 | | | | | | | | | ACCCCAGCAGGT |
| | | | | | | | | | CATGAGGGTCTT |
| | | | | | | | | | GTGGTAACTTCT |
| | | | | | | | | | ACC |
| site | — | c.9874C > T | p.(Gln3292*) | 5.39 | 60.50 | NG | SpCas9-NG | A4 | ACAATCTGTCTG |
| A19 | | | | | | | | | CCACAGCACTTC |
| | | | | | | | | | TAGCCATGGCCA |
| | | | | | | | | | TCATGAAGCCTC |
| | | | | | | | | | CCA |
| site | rs764182950 | c.9815C > T | p.(Pro3272Leu) | 63.68 | 60.76 | NGG | SpCas9WT | A5 | AATCTGGTTTCC |
| A20 | | | | | | | | | TGAGGTGGAGTA |
| | | | | | | | | | CAGCATTCTGCC |
| | | | | | | | | | ACAGCAGGAAT |
| | | | | | | | | | CACC |
| site | rs527236137 | c.13010C > T | p.(Thr4337Met) | 10.04 | 64.05 | NG | SpCas9-NG | A7 | TTTGCTGGTGGA |
| A21 | | | | | | | | | GCATCCTCCACT |
| | | | | | | | | | CATGCAGGCTTG |
| | | | | | | | | | GAGTGCATAGCT |
| | | | | | | | | | ATA |
| site | rs367674026 | c.13822C > T | p.(Arg4608*) | 1.26 | 24.36 | NGG | SpCas9WT | A6 | CCCAGGGTGGTG |
| A22 | | | | | | | | | CACGCTTGAATT |
| | | | | | | | | | CATATTTCATAC |
| | | | | | | | | | CTTCAGGACATA |
| | | | | | | | | | AGG |
| site | rs757676723 | c.15017C > T | p.(Thr5006Met) | 2.21 | 27.39 | NG | SpCas9-NG | A5 | AGAGGTATCATA |
| A23 | | | | | | | | | TTGGATCAACGG |
| | | | | | | | | | CATCTTAACACT |
| | | | | | | | | | TCCTTCGTCAGT |
| | | | | | | | | | CGT |
| site | — | c.2755C > T | p.(Gln919*) | 0.74 | 22.01 | NG | SpCas9-NG | A9 | TGACGATTAGGC |
| A24 | | | | | | | | | ACACACAGGCA |
| | | | | | | | | | CTAGCCACTGAT |
| | | | | | | | | | TGGGTCACAAAT |
| | | | | | | | | | GGTC |

TABLE 6
Cytosine and adenine base editing for introduction of exon
skipping at exon splice acceptor sites (SAS) and splice
donor sites (SDS) in USH2A. Top to bottom, the Guide 5′→3′
spacer sequences in this table correspond to SEQ ID NOs:
36-63 and 92. (“BE4” indicates “BE4max”.)

| | | SDS | | % Efficiency | Guide 5′---->3′ | |
|---|---|---|---|---|---|---|
| | | or | Base | in WERi-RB | Spacer (SEQ ID | |
| Exon | CDS loci | SAS | Editors | cells | NOs: 36-63, 198) | PAM |
| 13 | C.2168-2A | SAS | ABE8e | 21 | GCUUUAGGGCUUAGG | catt |
| | | | | | UGUGAU | |
| 16 | C.3158-2A, | SAS | BE4-VRQR, | 35 | GGAGcUaaaUUacaa | agag |
| | C.3158-1G | | BE3-VRQR | | Ugaag | |
| 24 | C.4886-1G | SAS | BE4-VRQR | 25 | GCAGAGGAACcUaga | ggagat |
| | | | | | gaaga | |
| 28 | C.5573-1G | SAS | BE4 | 12 | CCGAAACCUAGCAAA | agggat |
| | | | | | UAGUA | |
| 43 | C.8559-2A | SAS | BE4 | 28 | AUCUAAAGCAAAAGA | agg |
| | | | | | CAAGC | |
| 45 | C.8846-2A | SAS | BE4 | 12 | CAGCUGUCAACAAUA | agg |
| | | | | | AAUGC | |
| 50 | C.9740-2A | SAS | BE4, BE4- | 2 | UUCACCUGUCAAUUU | aataat |
| | | | SaKKH | | AGGAC | |
| 56 | C.10940-2A | SAS | BE4-VRQR | 19 | AGACCUAGAAAAAGC | agaa |
| | | | | | AAGCA | |
| 59 | C.11390-2A | SAS | BE4-VRQR | 30 | AUCCCUUUAAAGAGA | agag |
| | | | | | GAGAG | |
| 62 | C.12067-2A | SAS | BE4 | 21 | UGUUCCCUGUAAGAA | acaggt |
| | | | | | AAUUA | |
| 69 | C.14969-2A | SAS | BE4, ABE | 0 | GGCUAGACAAAAGGA | tgg |
| | | | 7.10 | | AGAAC | |
| 13 | C.2168-1G | SAS | ABE-NRTH | Optimize and | GUAUCUUUAGGGCUU | GATC |
| | | | | Test | AGGUGU | |
| 13 | C.2168-1G | SAS | BE4-NRRH | Optimize and | CCCUAAAGAUAAAAU | TAAA |
| | | | | Test | AUAUU | |
| 18 | C.4081+1G | SDS | BE4-SaKKH | to be tested | AAUUAUUCCUAGAGA | aatagt |
| | | | | | AAUUA | |
| 21 | C.4397-2A, | SAS | ABE 7.10 | to be tested | AUUUAGCACCAGCAC | agg |
| | C.4397-1G | | | | AACUG | |
| 29 | C.5777-2A | SAS | BE4-SaKKH | to be tested | UGGAGCUGUGAAGGA | agag |
| | | | | | AUAAA | |
| 30 | C.5858-2A | SAS | BE4-VRQR, | to be tested | UUUAUUAUAGGCAUA | agg |
| | | | BE4 | | UUGAC | |
| 31 | C.6050-2A | SAS | ABE 7.10 | to be tested | UCUUGUGGGGCUGUG | aaagat |
| | | | | | GAAGA | |
| 32 | C.6164-2A | SAS | BE4-SaKKH | to be tested | AUUACCUACUGAUUA | gaaaat |
| | | | | | AAAAA | |
| 38 | C.7121-2A | SAS | BE4-SaKKH | to be tested | AUCUAAAGCAAAAGA | agg |
| | | | | | CAAGC | |
| 69 | C.14969-1G | SAS | ABE 7.10 | to be tested | GGCUAGACAAAAGGA | tgg |
| | | | | | AGAAC | |
| 69 | C.15052+1G | SDS | ABE 7.10 | to be tested | CCUUUUUCUUCCGAU | AGG |
| | | | | | CUGUU | |
| 71 | C.15298-2A | SAS | BE4-SaKKH | to be tested | CCCCUGAGAAGGAAG | gtgagt |
| | | | | | UUGCU | |
| 28 | C.5573-1G | SAS | BE4 | to be tested | CGAAACCUAGCAAAU | ggg |
| | | | | | AGUAA | |
| 28 | C.5573-1G | SAS | BE4 | to be tested | CCGAAACCUAGCAAA | agg |
| | | | | | UAGUA | |
| 28 | C.5776+1G | SDS | BE4 | to be tested | GAAACCUAGCAAAUA | ggat |
| | | | | | GUAAG | |
| 50 | C.9740-1G | SAS | BE4, BE4- | to be tested | UACUUCACCUGUCAA | gacaat |
| | | | SaKKH | | UUUAG | |
| 50 | C.9958+1G | SDS | BE4, BE4- | to be tested | CAUACUUCACCUGUC | agg |
| | | | SaKKH | | AAUUU | |
| 25 | C.4988-2A | SAS | ABE 7.10 | to be tested | CCUGCAGAGAUAAUC | agg |
| | | | | | CAAAA | |

### Methods

### Sequencing and Data Analysis

[0579] Genomic DNA was amplified by PCR using universal primers found in the edited portion of the transgene, was purified by QlAquick PCR Purification Kit (Qiagen), and was submitted for Sanger sequencing and Amplicon sequencing (CCIB DNA Core Facility at Massachusetts General Hospital, Cambridge, Mass.). For Sanger sequencing, editing effciency was quantified by EditR (https://moriaritylab.shinyapps.io/editrv10/). The result of amplicon sequencing was analyzed by CRISPResso2 (http://crispresso.pinellolab.partners.org/). The CRISPRessoWGS Linux program was run with the following parameters: minimum homology for alignment to an amplicon 60%, quantificationwindowcenter −10, quantificationwindowsize 20. For productive edit calculations, custom scripts and Microsoft Excel were used to evaluate and tabulate if each read coded for the exact protein sequence desired, without additional missense changes, nonsense changes, or indels.

### Functional USH2A Protein Restoration After Base Editing

[0580] 1.5×10⁵ HEK293 cells were seeded into 48-well cell culture plates, transfected with 160 ng of ABE8 plasmid vector, 60 ng of sgRNA plasmid vector and 100 ng of USH2A WT or mutant (A1, A7, A12, A15) plasmid vector. Two days after transfection, cells were fixed with 1% paraformaldehyde (PFA) for 30 seconds, were blocked in 1% bovine serum albumin and 10% goat serum in PBS (pH 7.4) and were stained overnight with USH2A (1:4000) antibody that recognizes the intracellular region of USH2A 7, followed by labeling with Alexa Fluor 594-conjugated secondary antibody and Hoechst 33342 for nuclear staining. Images were taken with a fluorescent microscope (Eclipse Ti, Nikon, Tokyo, Japan). Cells positive for full length USH2A were counted in 6 fields per sample by Image J software (National Institute of Mental Health, MD, USA). (Co-transfection with a GFP expression plasmid confirmed a high transfection rate. However, this GFP signal was no longer visible after permeabilization with the very mild fixation conditions described above which are required for use of the USH2A antibody.)

### Example 3

### Monkey Transfection Experiments

[0581] The potential of the wildtype rhesus monkey to serve as a testbed for estimating the efficiency of editing at the Al target adenine base was evaluated. Plasmids were created which contained the rhesus monkey, marmoset monkey, and human-specific USH2A editing targets shown in FIG. 17A. The plasmids contained wild-type and mutant human sequences, wild-type and mutant rhesus sequences, and a mutant marmoset sequence. Rhesus monkey ells were transiently transfected by vectors encoding the editing targets, a base editor (BE), and sgRNA. After transient transfection, each target sequence was amplified by PCR followed by Sanger sequencing to quantify the editing efficiency of the target base.

[0582] Editing efficiencies (% of A to G editing) at sites A3, A7, and A10 following administration of the ABE7.10, ABE8, are shown in FIG. 17B. Based on the editing efficiency of A7 in monkey study (in vivo), the editing efficiency of pathological mutations in human HEK293 cells may be translatable to monkey subjects because the editing efficiency of A7 in human mutated sequences is expected to be similar to that in monkey wild-type sequences. The site A1 51 bp sequence in human and monkey is homologous. These results are encouraging for the evaluation of these base editors in a non-human primate study.

TABLE 10
Primer sequence for cloning of sgRNA

| Target | Forward 5′->3′ | Reverse 5′->3′ | | |
|---|---|---|---|---|
| site | (SEQ ID NOS: | (SEQ ID NOS: | Type of | |
| name | 448-483) | 484-519) | Cas9 | PAM |
| C1 | CACCGCTCTTACCTTGGGAAA | AAACCTCCTTTCCCAAGGTAA | S. | NGG |
| | GGAG | GAGC | pyogenes | |
| C2 | CACCGTTCCTTCCCGCATCAG | AAACTTCCCTGATGCGGGAAG | S. | NGG |
| | GGAA | GAAC | pyogenes | |
| C3 | CACCGTTCCCCGTAAGAAAAT | AAACGTTAATTTTCTTACGGG | S. | NGG |
| | TAAC | GAAC | pyogenes | |
| C4 | CACCGATCCAAAGCAAAAGAC | AAACGCTTGTCTTTTGCTTTG | S. | NGG |
| | AAGC | GATC | pyogenes | |
| C5 | CACCGATTGGTGATTCCCGCT | AAACCCACAGCGGGAATCACC | S. aureus | NNG |
| | GTGG | AATC | | AAT |
| C6 | CACCGTAACAGGAATATTTGG | AAACTATACCAAATATTCCTG | S. | NGG |
| | TATA | TTAC | pyogenes | |
| C7 | CACCGTAGACGCCTCTGCTCC | AAACCCTGGGAGCAGAGGCGT | S. | NGA |
| | CAGG | CTAC | pyogenes | |
| C8 | CACCGATGAGTCTACTATTAC | AAACGAGAGTAATAGTAGACT | S. aureus | NNN |
| | TCTC | CATC | | AAT |
| C9 | CACCGCTTAAACCGGAGAAAA | AAACTAGGTTTTCTCCGGTTT | S. aureus | NNN |
| | CCTA | AAGC | | AAT |
| A1 | CACCGTAGTCATTAACACAAA | AAACGAGTTTGTGTTAATGAC | S. | NGG |
| | CTC | TAC | pyogenes | |
| A2 | CACCGCAACCATGCAAGCTTT | AAACGCTGAAAGCTTGCATGG | S. | NGA |
| | CAGC | TTGC | pyogenes | |
| A3 | CACCGCTTCAGAGAAATTTAA | AAACGATTTAAATTTCTCTGA | S. aureus | NNN |
| | ATC | AGC | | AAT |
| A4 | CACCGTGATTCACAGATGCTT | AAACCTCGAAGCATCTGTGAA | S. | NGA |
| | CGAG | TCAC | pyogenes | |
| A5 | CACCGCTCAGTACTGAGGCAC | AAACACAGTGCCTCAGTACTG | S. | NGG |
| | TGT | AGC | pyogenes | |
| A6 | CACCGTTCAAAAGCTGGCCTT | AAACCATTAAGGCCAGCTTTT | S. aureus | NNN |
| | AATG | GAAC | | GGT |
| A7 | CACCGAGACCTCATGACTCAG | AAACTTGACTGAGTCATGAGG | S. | NGA |
| | TCAA | TCTC | pyogenes | |
| A8 | CACCGCCATTCATGCAGGCTA | AAACCTTGTAGCCTGCATGAA | S. | NGA |
| | CAAG | TGGC | pyogenes | |
| A9 | CACCGTCCATTATCCAGGCAG | AAACAAATCTGCCTGGATAAT | S. | NGA |
| | ATTT | GGAC | pyogenes | |
| A10 | CACCGTGTCAGAAGAATGCAA | AAACAATCTTGCATTCTTCTG | S. aureus | NNN |
| | GATT | ACAC | | GAT |
| Dnmt1 | CACCGCGGGCTGGAGCTGTTC | AAACGCGCGAACAGCTCCAGC | S. | NGG |
| | GCGC | CCGC | pyogenes | |
| C10 | CACCGGGCAGCGTGAGTGCAA | AAACTTTTTGCACTCACGCTG | S. | NGA |
| | AAA | CCC | pyogenes | |
| C11 | CACCGCTCTAAAGTAAAATAA | AAACGGATTTATTTTACTTTA | S. | NGA |
| | ATCC | GAGC | pyogenes | |
| A1l | CACCGAACCATGACACTCTAT | AAACGATAATAGAGTGTCATG | S. | NGC |
| | TATC | GTTC | pyogenes | |
| A12 | CACCGTTGTCAGAAAAAGTAA | AAACAGGATTACTTTTTCTGA | S. | NGC |
| | TCCT | CAAC | pyogenes | |
| A13 | CACCGCTACCCTGTCTTAGCA | AAACGTAATGCTAAGACAGGG | S. | NGA |
| | TTAC | TAGC | pyogenes | |
| A14 | CACCGACTAATTACACCTTCT | AAACAGGAAGAAGGTGTAATT | S. | NGA |
| | TCCT | AGTC | pyogenes | |
| A15 | CACCGAACTCAACTTTCCTCA | AAACCATCTGAGGAAAGTTGA | S. | NGG |
| | GATG | GTTC | pyogenes | |
| A16 | CACCGAACTTCACGGGAGCCC | AAACGGGAGGGCTCCCGTGAA | S. | NGA |
| | TCCC | GTTC | pyogenes | |
| A17 | CACCGTTCGGTAGTTGCATGA | AAACTCCTTCATGCAACTACC | S. | NGT |
| | AGGA | GAAC | pyogenes | |
| A18 | CACCGAGCAGGTCATGAGGGT | AAACCAAGACCCTCATGACCT | S. | NGG |
| | CTTG | GCTC | pyogenes | |
| A19 | CACCGTCTAGCCATGGCCATC | AAACTCATGATGGCCATGGCT | S. | NGC |
| | ATGA | AGAC | pyogenes | |
| A20 | CACCGTACAGCATTCTGCCAC | AAACGCTGTGGCAGAATGCTG | S. | NGG |
| | AGC | TAC | pyogenes | |
| A21 | CACCGCCACTCATGCAGGCTT | AAACCTCCAAGCCTGCATGAG | S. | NGC |
| | GGAG | TGGC | pyogenes | |
| A22 | CACCGAATTCATATTTCATAC | AAACGAAGGTATGAAATATGA | S. | NGG |
| | CTTC | ATTC | pyogenes | |
| A23 | CACCGCGGCATCTTAACACTT | AAACAAGGAAGTGTTAAGATG | S. | NGT |
| | CCTT | CCGC | pyogenes | |
| A24 | CACCGCAGGCACTAGCCACTG | AAACCAATCAGTGGCTAGTGC | S. | NGT |
| | ATTG | CTGC | pyogenes | |

TABLE 11
Primer sequences.

| Primer | sequence (5′-->3′) |
|---|---|
| name | (SEQ ID NOS: 520-536) |
| M13-F | CCCAGTCACGACGTTGTAAAACG |
| M13-R | AGCGGATAACAATTTCACACAGG |
| AOX-F | GACTGGTTCCAATTGACAAGC |
| AOX-R | GCAAATGGCATTCTGACATCC |
| Luc-F | AGTCAAGTAACAACCGCGA |
| Luc-R | CCTTATGCAGTTGCTCTCC |
| Bglo-F | CTGGTCATCATCCTGCCTTT |
| Bglo-R | GCCCCCTCCATATAACA |
| CMV-F | AAATGGGCGGTAGGCGTG |
| XL39-R | ATTAGGACAAGGCTGGTGGG |
| tdTomat0-F | CTGTTCCTGTACGGCATGG |
| tdTomato-R | CTTTGATGACGGCCATGT |
| GW-F | AATCTCGCCGGATCCTAACT |
| GW-R | GCATGATGACCACCGATATG |
| PuroDNR-1F | GGTCCACTAGTGCTGTCCTG |
| AAVS-1R | AGGTTCCGTCTTCCTCCACT |
| AAVS-2F | CTTGCCAAGGACTCAAACCC |

TABLE 12
Primer set used to check off-target sequence
and size of the PCR product.

| | | length |
|---|---|---|
| | | of PCR |
| | 5′-->3′ | product |
| Primer name | (SEQ ID NOS: 537-552) | (bp) |
| A-m1_5p_fwd | TGTCAGATACCATATGCTGCTCAGCTTC | 1882 |
| | CAGTGGAGAGTCTAAAG | |
| A-m1_5p_rev | GTTAATGACTACAGACTCTCCACTGAAC | |
| A-m1_3p_fwd | GAGAGTCTGTAGTCATTAACACAAACTC | 687 |
| | TGG | |
| A-m1_3p_rev | GTTAACAGGCTCAGACCAGCTCAGCTCA | |
| | ACACTGGTGGACTTC | |
| A-m7_5p_fwd | CAGATCCGCTAGAGATCCGCGGCCGCCA | 139 |
| | CCATGAATTGCC | |
| A-m7_5p_rev | AAAGACCTCATGACTCAGTCAAGGATAT | |
| | TGAAGC | |
| A-m7_3p_fwd | GACTGAGTCATGAGGTCTTTTCCCAAGG | 857 |
| | CTGGAG | |
| A-m7_3p_rev | GTGCCAAAGGGTGGACCCGCGGGTGGCT | |
| | GCCAGGGCAACG | |
| A-m12_5p_fwd | CAGATCCGCTAGAGATCCGCGGCCGCCA | 1915 |
| | CCATGAATTGCCCAGTTC | |
| A-m12_5p_rev | CAACTTGTCAGAAAAAGTAATCCTTGCA | |
| | CAGC | |
| A-m12_3p_fwd | TTACTTTTTCTGACAAGTTGGTGCAGAT | 156 |
| | C | |
| A-m12_3p_rev | TTGCACTGCCTGCCAGACACGTGTCTCT | |
| | TACAATTACACTGTCCTC | |
| A-m15_5p_fwd | AGTGTAATTGTAAGAGACACGTGTCTGG | 1912 |
| | CAGGCAGTGCAATCAG | |
| A-m15_5p_rev | TGAAAAACTCAACTTTCCTCAGATGTGG | |
| | TTTCTTTAG | |
| A-m15_3p_fwd | GAGGAAAGTTGAGTTTTTCAGAGCAGTG | 1308 |
| A-m15_3p_rev | AAGTTCCAGGAACCCTGCTCCTAGGAAC | |
| | TGAGCTCCCTCATTTAATG | |

### REFERENCES

[0583] Each of the below references is incorporated herein in its entirety.
[0584] 1. Fokkema, I. F. et al. LOVD v.2.0: the next generation in gene variant databases. Hum Mutat 32, 557-563, doi:10.1002/humu.21438 (2011).
[0585] 2. Stenson, P. D. et al. The Human Gene Mutation Database (HGMD((R))): optimizing its use in a clinical diagnostic or research setting. Hum Genet 139, 1197-1207, doi:10.1007/s00439-020-02199-3 (2020).
[0586] 3. Levy, J. M. et al. Cytosine and adenine base editing of the brain, liver, retina, heart and skeletal muscle of mice via adeno-associated viruses. Nat Biomed Eng 4, 97-110, doi:10.1038/s41551-019-0501-5 (2020).
[0587] 4. Komor, A. C. et al. Improved base excision repair inhibition and bacteriophage Mu Gam protein yields C:G-to-T:A base editors with higher efficiency and product purity. Sci Adv 3, eaao4774, doi:10.1126/sciadv.aao4774 (2017).
[0588] 5. Richter, M. F. et al. Phage-assisted evolution of an adenine base editor with improved Cas domain compatibility and activity. Nat Biotechnol 38, 883-891, doi:10.1038/s41587-020-0453-z (2020).
[0589] 6. Tsai, S. Q. et al. CIRCLE-seq: a highly sensitive in vitro screen for genome-wide CRISPR-Cas9 nuclease off-targets. Nat Methods 14, 607-614, doi:10.1038/nmeth.4278 (2017).
[0590] 7. Pendse, N. D. et al. In Vivo Assessment of Potential Therapeutic Approaches for USH2A-Associated Diseases. Adv Exp Med Biol 1185, 91-96, doi:10.1007/978-3-030-27378-115 (2019).

### EQUIVALENTS AND SCOPE

[0591] Those skilled in the art will recognize, or be able to ascertain using no more than routine experimentation, many equivalents to the specific embodiments of the invention described herein. The scope of the present invention is not intended to be limited to the above description, but rather is as set forth in the appended claims.

[0592] In the claims articles such as “a,” “an,” and “the” may mean one or more than one unless indicated to the contrary or otherwise evident from the context. Claims or descriptions that include “or” between one or more members of a group are considered satisfied if one, more than one, or all of the group members are present in, employed in, or otherwise relevant to a given product or process unless indicated to the contrary or otherwise evident from the context. The invention includes embodiments in which exactly one member of the group is present in, employed in, or otherwise relevant to a given product or process. The invention also includes embodiments in which more than one, or all of the group members are present in, employed in, or otherwise relevant to a given product or process.

[0593] Furthermore, it is to be understood that the invention encompasses all variations, combinations, and permutations in which one or more limitations, elements, clauses, descriptive terms, etc., from one or more of the claims or from relevant portions of the description is introduced into another claim. For example, any claim that is dependent on another claim can be modified to include one or more limitations found in any other claim that is dependent on the same base claim. Furthermore, where the claims recite a composition, it is to be understood that methods of using the composition for any of the purposes disclosed herein are included, and methods of making the composition according to any of the methods of making disclosed herein or other methods known in the art are included, unless otherwise indicated or unless it would be evident to one of ordinary skill in the art that a contradiction or inconsistency would arise.

[0594] Where elements are presented as lists, e.g., in Markush group format, it is to be understood that each subgroup of the elements is also disclosed, and any element(s) can be removed from the group. It is also noted that the term “comprising” is intended to be open and permits the inclusion of additional elements or steps. It should be understood that, in general, where the invention, or aspects of the invention, is/are referred to as comprising particular elements, features, steps, etc., certain embodiments of the invention or aspects of the invention consist, or consist essentially of, such elements, features, steps, etc. For purposes of simplicity those embodiments have not been specifically set forth in haec verba herein. Thus for each embodiment of the invention that comprises one or more elements, features, steps, etc., the invention also provides embodiments that consist or consist essentially of those elements, features, steps, etc.

[0595] Where ranges are given, endpoints are included. Furthermore, it is to be understood that unless otherwise indicated or otherwise evident from the context and/or the understanding of one of ordinary skill in the art, values that are expressed as ranges can assume any specific value within the stated ranges in different embodiments of the invention, to the tenth of the unit of the lower limit of the range, unless the context clearly dictates otherwise. It is also to be understood that unless otherwise indicated or otherwise evident from the context and/or the understanding of one of ordinary skill in the art, values expressed as ranges can assume any subrange within the given range, wherein the endpoints of the subrange are expressed to the same degree of accuracy as the tenth of the unit of the lower limit of the range.

[0596] In addition, it is to be understood that any particular embodiment of the present invention may be explicitly excluded from any one or more of the claims. Where ranges are given, any value within the range may explicitly be excluded from any one or more of the claims. Any embodiment, element, feature, application, or aspect of the compositions and/or methods of the invention, can be excluded from any one or more claims. For purposes of brevity, all of the embodiments in which one or more elements, features, purposes, or aspects is excluded are not set forth explicitly herein.

[0597] All publications, patents and sequence database entries mentioned herein, including those items listed above, are hereby incorporated by reference in their entirety as if each individual publication or patent was specifically and individually indicated to be incorporated by reference. In case of conflict, the present application, including any definitions herein, will control.

The application's sequence listing, which the Patent Office published only in electronic form, follows.

SEQUENCE LISTING (568 sequences)

SEQ ID NO: 1 - DNA, 51 bp, Artificial Sequence
  Synthetic
gccttttcttaaagatgatctcttaccttgggaaaggagaggtgttcaatt

SEQ ID NO: 2 - DNA, 51 bp, Artificial Sequence
  Synthetic
ccttgcacagctcacagttccttcccgcatcagggaaaggttatgcattat

SEQ ID NO: 3 - DNA, 51 bp, Artificial Sequence
  Synthetic
caggtgggcttgatggcttgttccccgtaagaaaattaacaggttaagttg

SEQ ID NO: 4 - DNA, 51 bp, Artificial Sequence
  Synthetic
attttacgtctcagaagctcatatccaaagcaaaagacaagcaggaacatc

SEQ ID NO: 5 - DNA, 51 bp, Artificial Sequence
  Synthetic
ggtttctgttggcattggtgattcccgctgtggcagaatgccgtactccac

SEQ ID NO: 6 - DNA, 51 bp, Artificial Sequence
  Synthetic
atgcacattggtggtctcaatgtaacaggaatatttggtatatggtaacag

SEQ ID NO: 7 - DNA, 51 bp, Artificial Sequence
  Synthetic
cgacacaacaagccagccatatagacgcctctgctcccaggagagcttcac

SEQ ID NO: 8 - DNA, 51 bp, Artificial Sequence
  Synthetic
ctgaaaccttataggatatatgagtctactattactctctgcaattcagtt

SEQ ID NO: 9 - DNA, 51 bp, Artificial Sequence
  Synthetic
tcttgaagatacaattgtcttaaaccggagaaaacctatacaatcaaatgg

SEQ ID NO: 10 - DNA, 51 bp, Artificial Sequence
  Synthetic
attctgcaatcctcactctgggcagcgtgagtgcaaaaaagaagccaaagg

SEQ ID NO: 11 - DNA, 51 bp, Artificial Sequence
  Synthetic
cggaggaactacaggtccaggttctctaaagtaaaataaatccagaaagtc

SEQ ID NO: 12 - DNA, 51 bp, Artificial Sequence
  Synthetic
tccaagggttcagtggagagtctgtagtcattaacacaaactctggaagct

SEQ ID NO: 13 - DNA, 51 bp, Artificial Sequence
  Synthetic
gctactggtggcacagccagcaaccatgcaagctttcagctgatatgaata

SEQ ID NO: 14 - DNA, 51 bp, Artificial Sequence
  Synthetic
tcacatccaacatcattaaagcttcagagaaatttaaatccaaaattgcaa

SEQ ID NO: 15 - DNA, 51 bp, Artificial Sequence
  Synthetic
aaaataattcgctatgaagtgattcacagatgcttcgagggaaaagcttgg

SEQ ID NO: 16 - DNA, 51 bp, Artificial Sequence
  Synthetic
ttgctgtccaccgaaaatggggctcagtactgaggcactgtggggagaaag

SEQ ID NO: 17 - DNA, 51 bp, Artificial Sequence
  Synthetic
atcaaaccttcaggcacttttgttcaaaagctggccttaatgcctggtaag

SEQ ID NO: 18 - DNA, 51 bp, Artificial Sequence
  Synthetic
ttctccagccttgggaaaagacctcatgactcagtcaaggatattgaagca

SEQ ID NO: 19 - DNA, 51 bp, Artificial Sequence
  Synthetic
cacactagctgtgcaacctccattcatgcaggctacaagggagaagttata

SEQ ID NO: 20 - DNA, 51 bp, Artificial Sequence
  Synthetic
catgttctctggcagggcctccattatccaggcagattttgacacactagc

SEQ ID NO: 21 - DNA, 51 bp, Artificial Sequence
  Synthetic
atttgcaggtttagagcagtttgtcagaagaatgcaagattttcgattata

SEQ ID NO: 22 - DNA, 51 bp, Artificial Sequence
  Synthetic
agaggatgggcttcaggattcaaccatgacactctattatcagctgtgtct

SEQ ID NO: 23 - DNA, 51 bp, Artificial Sequence
  Synthetic
gccgaaggatctgcaccaacttgtcagaaaaagtaatccttgcacagctca

SEQ ID NO: 24 - DNA, 51 bp, Artificial Sequence
  Synthetic
tcaacattgggcttgcagatgcactaccctgtcttagcattacagacagtc

SEQ ID NO: 25 - DNA, 51 bp, Artificial Sequence
  Synthetic
atttctttcttacctggttgacactaattacaccttcttccttgacgatta

SEQ ID NO: 26 - DNA, 51 bp, Artificial Sequence
  Synthetic
agccaaccactgctctgaaaaactcaactttcctcagatgtggtttcttta

SEQ ID NO: 27 - DNA, 51 bp, Artificial Sequence
  Synthetic
tccttcctgaggatggtataacttcacgggagccctcccagaaagactcct

SEQ ID NO: 28 - DNA, 51 bp, Artificial Sequence
  Synthetic
cccttactatttgctaggtttcggtagttgcatgaaggatgttaaatttac

SEQ ID NO: 29 - DNA, 51 bp, Artificial Sequence
  Synthetic
acaggtggctgcaccccagcaggtcatgagggtcttgtggtaacttctacc

SEQ ID NO: 30 - DNA, 51 bp, Artificial Sequence
  Synthetic
acaatctgtctgccacagcacttctagccatggccatcatgaagcctccca

SEQ ID NO: 31 - DNA, 51 bp, Artificial Sequence
  Synthetic
aatctggtttcctgaggtggagtacagcattctgccacagcaggaatcacc

SEQ ID NO: 32 - DNA, 51 bp, Artificial Sequence
  Synthetic
tttgctggtggagcatcctccactcatgcaggcttggagtgcatagctata

SEQ ID NO: 33 - DNA, 51 bp, Artificial Sequence
  Synthetic
cccagggtggtgcacgcttgaattcatatttcataccttcaggacataagg

SEQ ID NO: 34 - DNA, 51 bp, Artificial Sequence
  Synthetic
agaggtatcatattggatcaacggcatcttaacacttccttcgtcagtcgt

SEQ ID NO: 35 - DNA, 51 bp, Artificial Sequence
  Synthetic
tgacgattaggcacacacaggcactagccactgattgggtcacaaatggtc

SEQ ID NO: 36 - RNA, 21 nt, Artificial Sequence
  Synthetic
gcuuuagggcuuaggugugau

SEQ ID NO: 37 - RNA, 20 nt, Artificial Sequence
  Synthetic
ggagcuaaauuacaaugaag

SEQ ID NO: 38 - RNA, 20 nt, Artificial Sequence
  Synthetic
gcagaggaaccuagagaaga

SEQ ID NO: 39 - RNA, 20 nt, Artificial Sequence
  Synthetic
ccgaaaccuagcaaauagua

SEQ ID NO: 40 - RNA, 20 nt, Artificial Sequence
  Synthetic
aucuaaagcaaaagacaagc

SEQ ID NO: 41 - RNA, 20 nt, Artificial Sequence
  Synthetic
cagcugucaacaauaaaugc

SEQ ID NO: 42 - RNA, 20 nt, Artificial Sequence
  Synthetic
uucaccugucaauuuaggac

SEQ ID NO: 43 - RNA, 20 nt, Artificial Sequence
  Synthetic
agaccuagaaaaagcaagca

SEQ ID NO: 44 - RNA, 20 nt, Artificial Sequence
  Synthetic
aucccuuuaaagagagagag

SEQ ID NO: 45 - RNA, 20 nt, Artificial Sequence
  Synthetic
uguucccuguaagaaaauua

SEQ ID NO: 46 - RNA, 20 nt, Artificial Sequence
  Synthetic
ggcuagacaaaaggaagaac

SEQ ID NO: 47 - RNA, 21 nt, Artificial Sequence
  Synthetic
guaucuuuagggcuuaggugu

SEQ ID NO: 48 - RNA, 20 nt, Artificial Sequence
  Synthetic
cccuaaagauaaaauauauu

SEQ ID NO: 49 - RNA, 20 nt, Artificial Sequence
  Synthetic
aauuauuccuagagaaauua

SEQ ID NO: 50 - RNA, 20 nt, Artificial Sequence
  Synthetic
auuuagcaccagcacaacug

SEQ ID NO: 51 - RNA, 20 nt, Artificial Sequence
  Synthetic
uggagcugugaaggaauaaa

SEQ ID NO: 52 - RNA, 20 nt, Artificial Sequence
  Synthetic
uuuauuauaggcauauugac

SEQ ID NO: 53 - RNA, 20 nt, Artificial Sequence
  Synthetic
ucuuguggggcuguggaaga

SEQ ID NO: 54 - RNA, 20 nt, Artificial Sequence
  Synthetic
auuaccuacugauuaaaaaa

SEQ ID NO: 55 - RNA, 20 nt, Artificial Sequence
  Synthetic
aucuaaagcaaaagacaagc

SEQ ID NO: 56 - RNA, 20 nt, Artificial Sequence
  Synthetic
ggcuagacaaaaggaagaac

SEQ ID NO: 57 - RNA, 20 nt, Artificial Sequence
  Synthetic
ccuuuuucuuccgaucuguu

SEQ ID NO: 58 - RNA, 20 nt, Artificial Sequence
  Synthetic
ccccugagaaggaaguugcu

SEQ ID NO: 59 - RNA, 20 nt, Artificial Sequence
  Synthetic
cgaaaccuagcaaauaguaa

SEQ ID NO: 60 - RNA, 20 nt, Artificial Sequence
  Synthetic
ccgaaaccuagcaaauagua

SEQ ID NO: 61 - RNA, 20 nt, Artificial Sequence
  Synthetic
gaaaccuagcaaauaguaag

SEQ ID NO: 62 - RNA, 20 nt, Artificial Sequence
  Synthetic
uacuucaccugucaauuuag

SEQ ID NO: 63 - RNA, 20 nt, Artificial Sequence
  Synthetic
cauacuucaccugucaauuu

SEQ ID NO: 64 - DNA, 51 bp, Artificial Sequence
  Synthetic
ggggaggcaagcgcaggcactcgggctggagctgttcgcgctggcatcttg

SEQ ID NO: 65 - DNA, 16 bp, Artificial Sequence
  Synthetic
cgggctggagctgttc

SEQ ID NO: 66 - DNA, 16 bp, Artificial Sequence
  Synthetic
ygggytggagctgttc

SEQ ID NO: 67 - DNA, 23 bp, Artificial Sequence
  Synthetic
taacaggaatatttggtatatgg

SEQ ID NO: 68 - DNA, 23 bp, Artificial Sequence
  Synthetic
gaacaggaaaatttggtataagg

SEQ ID NO: 69 - DNA, 23 bp, Artificial Sequence
  Synthetic
aaccagggatatttggtataagg

SEQ ID NO: 70 - DNA, 22 bp, Artificial Sequence
  Synthetic
actcaggaatatttggtatggg

SEQ ID NO: 71 - DNA, 23 bp, Artificial Sequence
  Synthetic
ttaaaggactatttggtataggg

SEQ ID NO: 72 - DNA, 23 bp, Artificial Sequence
  Synthetic
tatcaggagcatttggtataagg

SEQ ID NO: 73 - DNA, 23 bp, Artificial Sequence
  Synthetic
taacaggtatatttgttataagg

SEQ ID NO: 74 - protein, 1368 aa, Streptococcus pyogenes [sequence omitted]

SEQ ID NO: 75 - protein, 4104 aa, Streptococcus pyogenes
ATGGATAAAAAATATAGCATTGGCCTGGATATTGGCACCAACAGCGTGGGCTGGGCGGTGATTACCGATGAATATAAAGTGCCGAGCAAAAAATTTAAAGTGCTGGGCAACACCGATCGCCATAGCATTAAAAAAAACCTGATTGGCGCGCTGCTGTTTGATAGCGGCGAAACCGCGGAAGCGACCCGCCTGAAACGCACCGCGCGCCGCCGCTATACCCGCCGCAAAAACCGCATTTGCTATCTGCAGGAAATTTTTAGCAACGAAATGGCGAAAGTGGATGATAGCTTTTTTCATCGCCTGGAAGAAAGCTTTCTGGTGGAAGAAGATAAAAAACATGAACGCCATCCGATTTTTGGCAACATTGTGGATGAAGTGGCGTATCATGAAAAATATCCGACCATTTATCATCTGCGCAAAAAACTGGTGGATAGCACCGATAAAGCGGATCTGCGCCTGATTTATCTGGCGCTGGCGCATATGATTAAATTTCGCGGCCATTTTCTGATTGAAGGCGATCTGAACCCGGATAACAGCGATGTGGATAAACTGTTTATTCAGCTGGTGCAGACCTATAACCAGCTGTTTGAAGAAAACCCGATTAACGCGAGCGGCGTGGATGCGAAAGCGATTCTGAGCGCGCGCCTGAGCAAAAGCCGCCGCCTGGAAAACCTGATTGCGCAGCTGCCGGGCGAAAAAAAAAACGGCCTGTTTGGCAACCTGATTGCGCTGAGCCTGGGCCTGACCCCGAACTTTAAAAGCAACTTTGATCTGGCGGAAGATGCGAAACTGCAGCTGAGCAAAGATACCTATGATGATGATCTGGATAACCTGCTGGCGCAGATTGGCGATCAGTATGCGGATCTGTTTCTGGCGGCGAAAAACCTGAGCGATGCGATTCTGCTGAGCGATATTCTGCGCGTGAACACCGAAATTACCAAAGCGCCGCTGAGCGCGAGCATGATTAAACGCTATGATGAACATCATCAGGATCTGACCCTGCTGAAAGCGCTGGTGCGCCAGCAGCTGCCGGAAAAATATAAAGAAATTTTTTTTGATCAGAGCAAAAACGGCTATGCGGGCTATATTGATGGCGGCGCGAGCCAGGAAGAATTTTATAAATTTATTAAACCGATTCTGGAAAAAATGGATGGCACCGAAGAACTGCTGGTGAAACTGAACCGCGAAGATCTGCTGCGCAAACAGCGCACCTTTGATAACGGCAGCATTCCGCATCAGATTCATCTGGGCGAACTGCATGCGATTCTGCGCCGCCAGGAAGATTTTTATCCGTTTCTGAAAGATAACCGCGAAAAAATTGAAAAAATTCTGACCTTTCGCATTCCGTATTATGTGGGCCCGCTGGCGCGCGGCAACAGCCGCTTTGCGTGGATGACCCGCAAAAGCGAAGAAACCATTACCCCGTGGAACTTTGAAGAAGTGGTGGATAAAGGCGCGAGCGCGCAGAGCTTTATTGAACGCATGACCAACTTTGATAAAAACCTGCCGAACGAAAAAGTGCTGCCGAAACATAGCCTGCTGTATGAATATTTTACCGTGTATAACGAACTGACCAAAGTGAAATATGTGACCGAAGGCATGCGCAAACCGGCGTTTCTGAGCGGCGAACAGAAAAAAGCGATTGTGGATCTGCTGTTTAAAACCAACCGCAAAGTGACCGTGAAACAGCTGAAAGAAGATTATTTTAAAAAAATTGAATGCTTTGATAGCGTGGAAATTAGCGGCGTGGAAGATCGCTTTAACGCGAGCCTGGGCACCTATCATGATCTGCTGAAAATTATTAAAGATAAAGATTTTCTGGATAACGAAGAAAACGAAGATATTCTGGAAGATATTGTGCTGACCCTGACCCTGTTTGAAGATCGCGAAATGATTGAAGAACGCCTGAAAACCTATGCGCATCTGTTTGATGATAAAGTGATGAAACAGCTGAAACGCCGCCGCTATACCGGCTGGGGCCGCCTGAGCCGCAAACTGATTAACGGCATTCGCGATAAACAGAGCGGCAAAACCATTCTGGATTTTCTGAAAAGCGATGGCTTTGCGAACCGCAACTTTATGCAGCTGATTCATGATGATAGCCTGACCTTTAAAGAAGATATTCAGAAAGCGCAGGTGAGCGGCCAGGGCGATAGCCTGCATGAACATATTGCGAACCTGGCGGGCAGCCCGGCGATTAAAAAAGGCATTCTGCAGACCGTGAAAGTGGTGGATGAACTGGTGAAAGTGATGGGCCGCCATAAACCGGAAAACATTGTGATTGAAATGGCGCGCGAAAACCAGACCACCCAGAAAGGCCAGAAAAACAGCCGCGAACGCATGAAACGCATTGAAGAAGGCATTAAAGAACTGGGCAGCCAGATTCTGAAAGAACATCCGGTGGAAAACACCCAGCTGCAGAACGAAAAACTGTATCTGTATTATCTGCAGAACGGCCGCGATATGTATGTGGATCAGGAACTGGATATTAACCGCCTGAGCGATTATGATGTGGATCATATTGTGCCGCAGAGCTTTCTGAAAGATGATAGCATTGATAACAAAGTGCTGACCCGCAGCGATAAAAACCGCGGCAAAAGCGATAACGTGCCGAGCGAAGAAGTGGTGAAAAAAATGAAAAACTATTGGCGCCAGCTGCTGAACGCGAAACTGATTACCCAGCGCAAATTTGATAACCTGACCAAAGCGGAACGCGGCGGCCTGAGCGAACTGGATAAAGCGGGCTTTATTAAACGCCAGCTGGTGGAAACCCGCCAGATTACCAAACATGTGGCGCAGATTCTGGATAGCCGCATGAACACCAAATATGATGAAAACGATAAACTGATTCGCGAAGTGAAAGTGATTACCCTGAAAAGCAAACTGGTGAGCGATTTTCGCAAAGATTTTCAGTTTTATAAAGTGCGCGAAATTAACAACTATCATCATGCGCATGATGCGTATCTGAACGCGGTGGTGGGCACCGCGCTGATTAAAAAATATCCGAAACTGGAAAGCGAATTTGTGTATGGCGATTATAAAGTGTATGATGTGCGCAAAATGATTGCGAAAAGCGAACAGGAAATTGGCAAAGCGACCGCGAAATATTTTTTTTATAGCAACATTATGAACTTTTTTAAAACCGAAATTACCCTGGCGAACGGCGAAATTCGCAAACGCCCGCTGATTGAAACCAACGGCGAAACCGGCGAAATTGTGTGGGATAAAGGCCGCGATTTTGCGACCGTGCGCAAAGTGCTGAGCATGCCGCAGGTGAACATTGTGAAAAAAACCGAAGTGCAGACCGGCGGCTTTAGCAAAGAAAGCATTCTGCCGAAACGCAACAGCGATAAACTGATTGCGCGCAAAAAAGATTGGGATCCGAAAAAATATGGCGGCTTTGATAGCCCGACCGTGGCGTATAGCGTGCTGGTGGTGGCGAAAGTGGAAAAAGGCAAAAGCAAAAAACTGAAAAGCGTGAAAGAACTGCTGGGCATTACCATTATGGAACGCAGCAGCTTTGAAAAAAACCCGATTGATTTTCTGGAAGCGAAAGGCTATAAAGAAGTGAAAAAAGATCTGATTATTAAACTGCCGAAATATAGCCTGTTTGAACTGGAAAACGGCCGCAAACGCATGCTGGCGAGCGCGGGCGAACTGCAGAAAGGCAACGAACTGGCGCTGCCGAGCAAATATGTGAACTTTCTGTATCTGGCGAGCCATTATGAAAAACTGAAAGGCAGCCCGGAAGATAACGAACAGAAACAGCTGTTTGTGGAACAGCATAAACATTATCTGGATGAAATTATTGAACAGATTAGCGAATTTAGCAAACGCGTGATTCTGGCGGATGCGAACCTGGATAAAGTGCTGAGCGCGTATAACAAACATCGCGATAAACCGATTCGCGAACAGGCGGAAAACATTATTCATCTGTTTACCCTGACCAACCTGGGCGCGCCGGCGGCGTTTAAATATTTTGATACCACCATTGATCGCAAACGCTATACCAGCACCAAAGAAGTGCTGGATGCGACCCTGATTCATCAGAGCATTACCGGCCTGTATGAAACCCGCATTGATCTGAGCCAGCTGGGCGGCGAT

SEQ ID NO: 76 - protein, 4104 aa, Streptococcus pyogenes
ATGGATAAGAAATACTCAATAGGCTTAGATATCGGCACAAATAGCGTCGGATGGGCGGTGATCACTGATGATTATAAGGTTCCGTCTAAAAAGTTCAAGGTTCTGGGAAATACAGACCGCCACAGTATCAAAAAAAATCTTATAGGGGCTCTTTTATTTGGCAGTGGAGAGACAGCGGAAGCGACTCGTCTCAAACGGACAGCTCGTAGAAGGTATACACGTCGGAAGAATCGTATTTGTTATCTACAGGAGATTTTTTCAAATGAGATGGCGAAAGTAGATGATAGTTTCTTTCATCGACTTGAAGAGTCTTTTTTGGTGGAAGAAGACAAGAAGCATGAACGTCATCCTATTTTTGGAAATATAGTAGATGAAGTTGCTTATCATGAGAAATATCCAACTATCTATCATCTGCGAAAAAAATTGGCAGATTCTACTGATAAAGCGGATTTGCGCTTAATCTATTTGGCCTTAGCGCATATGATTAAGTTTCGTGGTCATTTTTTGATTGAGGGAGATTTAAATCCTGATAATAGTGATGTGGACAAACTATTTATCCAGTTGGTACAAATCTACAATCAATTATTTGAAGAAAACCCTATTAACGCAAGTAGAGTAGATGCTAAAGCGATTCTTTCTGCACGATTGAGTAAATCAAGACGATTAGAAAATCTCATTGCTCAGCTCCCCGGTGAGAAGAGAAATGGCTTGTTTGGGAATCTCATTGCTTTGTCATTGGGATTGACCCCTAATTTTAAATCAAATTTTGATTTGGCAGAAGATGCTAAATTACAGCTTTCAAAAGATACTTACGATGATGATTTAGATAATTTATTGGCGCAAATTGGAGATCAATATGCTGATTTGTTTTTGGCAGCTAAGAATTTATCAGATGCTATTTTACTTTCAGATATCCTAAGAGTAAATAGTGAAATAACTAAGGCTCCCCTATCAGCTTCAATGATTAAGCGCTACGATGAACATCATCAAGACTTGACTCTTTTAAAAGCTTTAGTTCGACAACAACTTCCAGAAAAGTATAAAGAAATCTTTTTTGATCAATCAAAAAACGGATATGCAGGTTATATTGATGGGGGAGCTAGCCAAGAAGAATTTTATAAATTTATCAAACCAATTTTAGAAAAAATGGATGGTACTGAGGAATTATTGGTGAAACTAAATCGTGAAGATTTGCTGCGCAAGCAACGGACCTTTGACAACGGCTCTATTCCCCATCAAATTCACTTGGGTGAGCTGCATGCTATTTTGAGAAGACAAGAAGACTTTTATCCATTTTTAAAAGACAATCGTGAGAAGATTGAAAAAATCTTGACTTTTCGAATTCCTTATTATGTTGGTCCATTGGCGCGTGGCAATAGTCGTTTTGCATGGATGACTCGGAAGTCTGAAGAAACAATTACCCCATGGAATTTTGAAGAAGTTGTCGATAAAGGTGCTTCAGCTCAATCATTTATTGAACGCATGACAAACTTTGATAAAAATCTTCCAAATGAAAAAGTACTACCAAAACATAGTTTGCTTTATGAGTATTTTACGGTTTATAACGAATTGACAAAGGTCAAATATGTTACTGAGGGAATGCGAAAACCAGCATTTCTTTCAGGTGAACAGAAGAAAGCCATTGTTGATTTACTCTTCAAAACAAATCGAAAAGTAACCGTTAAGCAATTAAAAGAAGATTATTTCAAAAAAATAGAATGTTTTGATAGTGTTGAAATTTCAGGAGTTGAAGATAGATTTAATGCTTCATTAGGCGCCTACCATGATTTGCTAAAAATTATTAAAGATAAAGATTTTTTGGATAATGAAGAAAATGAAGATATCTTAGAGGATATTGTTTTAACATTGACCTTATTTGAAGATAGGGGGATGATTGAGGAAAGACTTAAAACATATGCTCACCTCTTTGATGATAAGGTGATGAAACAGCTTAAACGTCGCCGTTATACTGGTTGGGGACGTTTGTCTCGAAAATTGATTAATGGTATTAGGGATAAGCAATCTGGCAAAACAATATTAGATTTTTTGAAATCAGATGGTTTTGCCAATCGCAATTTTATGCAGCTGATCCATGATGATAGTTTGACATTTAAAGAAGATATTCAAAAAGCACAGGTGTCTGGACAAGGCCATAGTTTACATGAACAGATTGCTAACTTAGCTGGCAGTCCTGCTATTAAAAAAGGTATTTTACAGACTGTAAAAATTGTTGATGAACTGGTCAAAGTAATGGGGCATAAGCCAGAAAATATCGTTATTGAAATGGCACGTGAAAATCAGACAACTCAAAAGGGCCAGAAAAATTCGCGAGAGCGTATGAAACGAATCGAAGAAGGTATCAAAGAATTAGGAAGTCAGATTCTTAAAGAGCATCCTGTTGAAAATACTCAATTGCAAAATGAAAAGCTCTATCTCTATTATCTACAAAATGGAAGAGACATGTATGTGGACCAAGAATTAGATATTAATCGTTTAAGTGATTATGATGTCGATCACATTGTTCCACAAAGTTTCATTAAAGACGATTCAATAGACAATAAGGTACTAACGCGTTCTGATAAAAATCGTGGTAAATCGGATAACGTTCCAAGTGAAGAAGTAGTCAAAAAGATGAAAAACTATTGGAGACAACTTCTAAACGCCAAGTTAATCACTCAACGTAAGTTTGATAATTTAACGAAAGCTGAACGTGGAGGTTTGAGTGAACTTGATAAAGCTGGTTTTATCAAACGCCAATTGGTTGAAACTCGCCAAATCACTAAGCATGTGGCACAAATTTTGGATAGTCGCATGAATACTAAATACGATGAAAATGATAAACTTATTCGAGAGGTTAAAGTGATTACCTTAAAATCTAAATTAGTTTCTGACTTCCGAAAAGATTTCCAATTCTATAAAGTACGTGAGATTAACAATTACCATCATGCCCATGATGCGTATCTAAATGCCGTCGTTGGAACTGCTTTGATTAAGAAATATCCAAAACTTGAATCGGAGTTTGTCTATGGTGATTATAAAGTTTATGATGTTCGTAAAATGATTGCTAAGTCTGAGCAAGAAATAGGCAAAGCAACCGCAAAATATTTCTTTTACTCTAATATCATGAACTTCTTCAAAACAGAAATTACACTTGCAAATGGAGAGATTCGCAAACGCCCTCTAATCGAAACTAATGGGGAAACTGGAGAAATTGTCTGGGATAAAGGGCGAGATTTTGCCACAGTGCGCAAAGTATTGTCCATGCCCCAAGTCAATATTGTCAAGAAAACAGAAGTACAGACAGGCGGATTCTCCAAGGAGTCAATTTTACCAAAAAGAAATTCGGACAAGCTTATTGCTCGTAAAAAAGACTGGGATCCAAAAAAATATGGTGGTTTTGATAGTCCAACGGTAGCTTATTCAGTCCTAGTGGTTGCTAAGGTGGAAAAAGGGAAATCGAAGAAGTTAAAATCCGTTAAAGAGTTACTAGGGATCACAATTATGGAAAGAAGTTCCTTTGAAAAAAATCCGATTGACTTTTTAGAAGCTAAAGGATATAAGGAAGTTAAAAAAGACTTAATCATTAAACTACCTAAATATAGTCTTTTTGAGTTAGAAAACGGTCGTAAACGGATGCTGGCTAGTGCCGGAGAATTACAAAAAGGAAATGAGCTGGCTCTGCCAAGCAAATATGTGAATTTTTTATATTTAGCTAGTCATTATGAAAAGTTGAAGGGTAGTCCAGAAGATAACGAACAAAAACAATTGTTTGTGGAGCAGCATAAGCATTATTTAGATGAGATTATTGAGCAAATCAGTGAATTTTCTAAGCGTGTTATTTTAGCAGATGCCAATTTAGATAAAGTTCTTAGTGCATATAACAAACATAGAGACAAACCAATACGTGAACAAGCAGAAAATATTATTCATTTATTTACGTTGACGAATCTTGGAGCTCCCGCTGCTTTTAAATATTTTGATACAACAATTGATCGTAAACGATATACGTCTACAAAAGAAGTTTTAGATGCCACTCTTATCCATCAATCCATCACTGGTCTTTATGAAACACGCATTGATTTGAGTCAGCTAGGAGGTGACTGA

SEQ ID NO: 77 - protein, 1367 aa, Streptococcus pyogenes
MDKKYSIGLDIGTNSVGWAVITDDYKVPSKKFKVLGNTDRHSIKKNLIGALLFGSGETAEATRLKRTARRRYTRRKNRICYLQEIFSNEMAKVDDSFFHRLEESFLVEEDKKHERHPIFGNIVDEVAYHEKYPTIYHLRKKLADSTDKADLRLIYLALAHMIKFRGHFLIEGDLNPDNSDVDKLFIQLVQIYNQLFEENPINASRVDAKAILSARLSKSRRLENLIAQLPGEKRNGLFGNLIALSLGLTPNFKSNFDLAEDAKLQLSKDTYDDDLDNLLAQIGDQYADLFLAAKNLSDAILLSDILRVNSEITKAPLSASMIKRYDEHHQDLTLLKALVRQQLPEKYKEIFFDQSKNGYAGYIDGGASQEEFYKFIKPILEKMDGTEELLVKLNREDLLRKQRTFDNGSIPHQIHLGELHAILRRQEDFYPFLKDNREKIEKILTFRIPYYVGPLARGNSRFAWMTRKSEETITPWNFEEVVDKGASAQSFIERMTNFDKNLPNEKVLPKHSLLYEYFTVYNELTKVKYVTEGMRKPAFLSGEQKKAIVDLLFKTNRKVTVKQLKEDYFKKIECFDSVEISGVEDRFNASLGAYHDLLKIIKDKDFLDNEENEDILEDIVLTLTLFEDRGMIEERLKTYAHLFDDKVMKQLKRRRYTGWGRLSRKLINGIRDKQSGKTILDFLKSDGFANRNFMQLIHDDSLTFKEDIQKAQVSGQGHSLHEQIANLAGSPAIKKGILQTVKIVDELVKVMGHKPENIVIEMARENQTTQKGQKNSRERMKRIEEGIKELGSQILKEHPVENTQLQNEKLYLYYLQNGRDMYVDQELDINRLSDYDVDHIVPQSFIKDDSIDNKVLTRSDKNRGKSDNVPSEEVVKKMKNYWRQLLNAKLITQRKFDNLTKAERGGLSELDKAGFIKRQLVETRQITKHVAQILDSRMNTKYDENDKLIREVKVITLKSKLVSDFRKDFQFYKVREINNYHHAHDAYLNAVVGTALIKKYPKLESEFVYGDYKVYDVRKMIAKSEQEIGKATAKYFFYSNIMNFFKTEITLANGEIRKRPLIETNGETGEIVWDKGRDFATVRKVLSMPQVNIVKKTEVQTGGFSKESILPKRNSDKLIARKKDWDPKKYGGFDSPTVAYSVLVVAKVEKGKSKKLKSVKELLGITIMERSSFEKNPIDFLEAKGYKEVKKDLIIKLPKYSLFELENGRKRMLASAGELQKGNELALPSKYVNFLYLASHYEKLKGSPEDNEQKQLFVEQHKHYLDEIIEQISEFSKRVILADANLDKVLSAYNKHRDKPIREQAENIIHLFTLTNLGAPAAFKYFDTTIDRKRYTSTKEVLDATLIHQSITGLYETRIDLSQLGGD

SEQ ID NO: 78 - protein, 4212 aa, Streptococcus pyogenes
ATGGATAAAAAGTATTCTATTGGTTTAGACATCGGCACTAATTCCGTTGGATGGGCTGTCATAACCGATGAATACAAAGTACCTTCAAAGAAATTTAAGGTGTTGGGGAACACAGACCGTCATTCGATTAAAAAGAATCTTATCGGTGCCCTCCTATTCGATAGTGGCGAAACGGCAGAGGCGACTCGCCTGAAACGAACCGCTCGGAGAAGGTATACACGTCGCAAGAACCGAATATGTTACTTACAAGAAATTTTTAGCAATGAGATGGCCAAAGTTGACGATTCTTTCTTTCACCGTTTGGAAGAGTCCTTCCTTGTCGAAGAGGACAAGAAACATGAACGGCACCCCATCTTTGGAAACATAGTAGATGAGGTGGCATATCATGAAAAGTACCCAACGATTTATCACCTCAGAAAAAAGCTAGTTGACTCAACTGATAAAGCGGACCTGAGGTTAATCTACTTGGCTCTTGCCCATATGATAAAGTTCCGTGGGCACTTTCTCATTGAGGGTGATCTAAATCCGGACAACTCGGATGTCGACAAACTGTTCATCCAGTTAGTACAAACCTATAATCAGTTGTTTGAAGAGAACCCTATAAATGCAAGTGGCGTGGATGCGAAGGCTATTCTTAGCGCCCGCCTCTCTAAATCCCGACGGCTAGAAAACCTGATCGCACAATTACCCGGAGAGAAGAAAAATGGGTTGTTCGGTAACCTTATAGCGCTCTCACTAGGCCTGACACCAAATTTTAAGTCGAACTTCGACTTAGCTGAAGATGCCAAATTGCAGCTTAGTAAGGACACGTACGATGACGATCTCGACAATCTACTGGCACAAATTGGAGATCAGTATGCGGACTTATTTTTGGCTGCCAAAAACCTTAGCGATGCAATCCTCCTATCTGACATACTGAGAGTTAATACTGAGATTACCAAGGCGCCGTTATCCGCTTCAATGATCAAAAGGTACGATGAACATCACCAAGACTTGACACTTCTCAAGGCCCTAGTCCGTCAGCAACTGCCTGAGAAATATAAGGAAATATTCTTTGATCAGTCGAAAAACGGGTACGCAGGTTATATTGACGGCGGAGCGAGTCAAGAGGAATTCTACAAGTTTATCAAACCCATATTAGAGAAGATGGATGGGACGGAAGAGTTGCTTGTAAAACTCAATCGCGAAGATCTACTGCGAAAGCAGCGGACTTTCGACAACGGTAGCATTCCACATCAAATCCACTTAGGCGAATTGCATGCTATACTTAGAAGGCAGGAGGATTTTTATCCGTTCCTCAAAGACAATCGTGAAAAGATTGAGAAAATCCTAACCTTTCGCATACCTTACTATGTGGGACCCCTGGCCCGAGGGAACTCTCGGTTCGCATGGATGACAAGAAAGTCCGAAGAAACGATTACTCCATGGAATTTTGAGGAAGTTGTCGATAAAGGTGCGTCAGCTCAATCGTTCATCGAGAGGATGACCAACTTTGACAAGAATTTACCGAACGAAAAAGTATTGCCTAAGCACAGTTTACTTTACGAGTATTTCACAGTGTACAATGAACTCACGAAAGTTAAGTATGTCACTGAGGGCATGCGTAAACCCGCCTTTCTAAGCGGAGAACAGAAGAAAGCAATAGTAGATCTGTTATTCAAGACCAACCGCAAAGTGACAGTTAAGCAATTGAAAGAGGACTACTTTAAGAAAATTGAATGCTTCGATTCTGTCGAGATCTCCGGGGTAGAAGATCGATTTAATGCGTCACTTGGTACGTATCATGACCTCCTAAAGATAATTAAAGATAAGGACTTCCTGGATAACGAAGAGAATGAAGATATCTTAGAAGATATAGTGTTGACTCTTACCCTCTTTGAAGATCGGGAAATGATTGAGGAAAGACTAAAAACATACGCTCACCTGTTCGACGATAAGGTTATGAAACAGTTAAAGAGGCGTCGCTATACGGGCTGGGGACGATTGTCGCGGAAACTTATCAACGGGATAAGAGACAAGCAAAGTGGTAAAACTATTCTCGATTTTCTAAAGAGCGACGGCTTCGCCAATAGGAACTTTATGCAGCTGATCCATGATGACTCTTTAACCTTCAAAGAGGATATACAAAAGGCACAGGTTTCCGGACAAGGGGACTCATTGCACGAACATATTGCGAATCTTGCTGGTTCGCCAGCCATCAAAAAGGGCATACTCCAGACAGTCAAAGTAGTGGATGAGCTAGTTAAGGTCATGGGACGTCACAAACCGGAAAACATTGTAATCGAGATGGCACGCGAAAATCAAACGACTCAGAAGGGGCAAAAAAACAGTCGAGAGCGGATGAAGAGAATAGAAGAGGGTATTAAAGAACTGGGCAGCCAGATCTTAAAGGAGCATCCTGTGGAAAATACCCAATTGCAGAACGAGAAACTTTACCTCTATTACCTACAAAATGGAAGGGACATGTATGTTGATCAGGAACTGGACATAAACCGTTTATCTGATTACGACGTCGATCACATTGTACCCCAATCCTTTTTGAAGGACGATTCAATCGACAATAAAGTGCTTACACGCTCGGATAAGAACCGAGGGAAAAGTGACAATGTTCCAAGCGAGGAAGTCGTAAAGAAAATGAAGAACTATTGGCGGCAGCTCCTAAATGCGAAACTGATAACGCAAAGAAAGTTCGATAACTTAACTAAAGCTGAGAGGGGTGGCTTGTCTGAACTTGACAAGGCCGGATTTATTAAACGTCAGCTCGTGGAAACCCGCCAAATCACAAAGCATGTTGCACAGATACTAGATTCCCGAATGAATACGAAATACGACGAGAACGATAAGCTGATTCGGGAAGTCAAAGTAATCACTTTAAAGTCAAAATTGGTGTCGGACTTCAGAAAGGATTTTCAATTCTATAAAGTTAGGGAGATAAATAACTACCACCATGCGCACGACGCTTATCTTAATGCCGTCGTAGGGACCGCACTCATTAAGAAATACCCGAAGCTAGAAAGTGAGTTTGTGTATGGTGATTACAAAGTTTATGACGTCCGTAAGATGATCGCGAAAAGCGAACAGGAGATAGGCAAGGCTACAGCCAAATACTTCTTTTATTCTAACATTATGAATTTCTTTAAGACGGAAATCACTCTGGCAAACGGAGAGATACGCAAACGACCTTTAATTGAAACCAATGGGGAGACAGGTGAAATCGTATGGGATAAGGGCCGGGACTTCGCGACGGTGAGAAAAGTTTTGTCCATGCCCCAAGTCAACATAGTAAAGAAAACTGAGGTGCAGACCGGAGGGTTTTCAAAGGAATCGATTCTTCCAAAAAGGAATAGTGATAAGCTCATCGCTCGTAAAAAGGACTGGGACCCGAAAAAGTACGGTGGCTTCGATAGCCCTACAGTTGCCTATTCTGTCCTAGTAGTGGCAAAAGTTGAGAAGGGAAAATCCAAGAAACTGAAGTCAGTCAAAGAATTATTGGGGATAACGATTATGGAGCGCTCGTCTTTTGAAAAGAACCCCATCGACTTCCTTGAGGCGAAAGGTTACAAGGAAGTAAAAAAGGATCTCATAATTAAACTACCAAAGTATAGTCTGTTTGAGTTAGAAAATGGCCGAAAACGGATGTTGGCTAGCGCCGGAGAGCTTCAAAAGGGGAACGAACTCGCACTACCGTCTAAATACGTGAATTTCCTGTATTTAGCGTCCCATTACGAGAAGTTGAAAGGTTCACCTGAAGATAACGAACAGAAGCAACTTTTTGTTGAGCAGCACAAACATTATCTCGACGAAATCATAGAGCAAATTTCGGAATTCAGTAAGAGAGTCATCCTAGCTGATGCCAATCTGGACAAAGTATTAAGCGCATACAACAAGCACAGGGATAAACCCATACGTGAGCAGGCGGAAAATATTATCCATTTGTTTACTCTTACCAACCTCGGCGCTCCAGCCGCATTCAAGTATTTTGACACAACGATAGATCGCAAACGATACACTTCTACCAAGGAGGTGCTAGACGCGACACTGATTCACCAATCCATCACGGGATTATATGAAACTCGGATAGATTTGTCACAGCTTGGGGGTGACGGATCCCCCAAGAAGAAGAGGAAAGTCTCGAGCGACTACAAAGACCATGACGGTGATTATAAAGATCATGACATCGATTACAAGGATGACGATGACAAGGCTGCAGGA

SEQ ID NO: 79 - protein, 1404 aa, Streptococcus pyogenes
MDKKYSIGLDIGTNSVGWAVITDEYKVPSKKFKVLGNTDRHSIKKNLIGALLFDSGETAEATRLKRTARRRYTRRKNRICYLQEIFSNEMAKVDDSFFHRLEESFLVEEDKKHERHPIFGNIVDEVAYHEKYPTIYHLRKKLVDSTDKADLRLIYLALAHMIKFRGHFLIEGDLNPDNSDVDKLFIQLVQTYNQLFEENPINASGVDAKAILSARLSKSRRLENLIAQLPGEKKNGLFGNLIALSLGLTPNFKSNFDLAEDAKLQLSKDTYDDDLDNLLAQIGDQYADLFLAAKNLSDAILLSDILRVNTEITKAPLSASMIKRYDEHHQDLTLLKALVRQQLPEKYKEIFFDQSKNGYAGYIDGGASQEEFYKFIKPILEKMDGTEELLVKLNREDLLRKQRTFDNGSIPHQIHLGELHAILRRQEDFYPFLKDNREKIEKILTFRIPYYVGPLARGNSRFAWMTRKSEETITPWNFEEVVDKGASAQSFIERMTNFDKNLPNEKVLPKHSLLYEYFTVYNELTKVKYVTEGMRKPAFLSGEQKKAIVDLLFKTNRKVTVKQLKEDYFKKIECFDSVEISGVEDRFNASLGTYHDLLKIIKDKDFLDNEENEDILEDIVLTLTLFEDREMIEERLKTYAHLFDDKVMKQLKRRRYTGWGRLSRKLINGIRDKQSGKTILDFLKSDGFANRNFMQLIHDDSLTFKEDIQKAQVSGQGDSLHEHIANLAGSPAIKKGILQTVKVVDELVKVMGRHKPENIVIEMARENQTTQKGQKNSRERMKRIEEGIKELGSQILKEHPVENTQLQNEKLYLYYLQNGRDMYVDQELDINRLSDYDVDHIVPQSFLKDDSIDNKVLTRSDKNRGKSDNVPSEEVVKKMKNYWRQLLNAKLITQRKFDNLTKAERGGLSELDKAGFIKRQLVETRQITKHVAQILDSRMNTKYDENDKLIREVKVITLKSKLVSDFRKDFQFYKVREINNYHHAHDAYLNAVVGTALIKKYPKLESEFVYGDYKVYDVRKMIAKSEQEIGKATAKYFFYSNIMNFFKTEITLANGEIRKRPLIETNGETGEIVWDKGRDFATVRKVLSMPQVNIVKKTEVQTGGFSKESILPKRNSDKLIARKKDWDPKKYGGFDSPTVAYSVLVVAKVEKGKSKKLKSVKELLGITIMERSSFEKNPIDFLEAKGYKEVKKDLIIKLPKYSLFELENGRKRMLASAGELQKGNELALPSKYVNFLYLASHYEKLKGSPEDNEQKQLFVEQHKHYLDEIIEQISEFSKRVILADANLDKVLSAYNKHRDKPIREQAENIIHLFTLTNLGAPAAFKYFDTTIDRKRYTSTKEVLDATLIHQSITGLYETRIDLSQLGGDGSPKKKRKVSSDYKDHDGDYKDHDIDYKDDDDKAAG

SEQ ID NO: 80 - protein, 4107 aa, Streptococcus pyogenes
ATGGATAAGAAATACTCAATAGGCTTAGATATCGGCACAAATAGCGTCGGATGGGCGGTGATCACTGATGAATATAAGGTTCCGTCTAAAAAGTTCAAGGTTCTGGGAAATACAGACCGCCACAGTATCAAAAAAAATCTTATAGGGGCTCTTTTATTTGACAGTGGAGAGACAGCGGAAGCGACTCGTCTCAAACGGACAGCTCGTAGAAGGTATACACGTCGGAAGAATCGTATTTGTTATCTACAGGAGATTTTTTCAAATGAGATGGCGAAAGTAGATGATAGTTTCTTTCATCGACTTGAAGAGTCTTTTTTGGTGGAAGAAGACAAGAAGCATGAACGTCATCCTATTTTTGGAAATATAGTAGATGAAGTTGCTTATCATGAGAAATATCCAACTATCTATCATCTGCGAAAAAAATTGGTAGATTCTACTGATAAAGCGGATTTGCGCTTAATCTATTTGGCCTTAGCGCATATGATTAAGTTTCGTGGTCATTTTTTGATTGAGGGAGATTTAAATCCTGATAATAGTGATGTGGACAAACTATTTATCCAGTTGGTACAAACCTACAATCAATTATTTGAAGAAAACCCTATTAACGCAAGTGGAGTAGATGCTAAAGCGATTCTTTCTGCACGATTGAGTAAATCAAGACGATTAGAAAATCTCATTGCTCAGCTCCCCGGTGAGAAGAAAAATGGCTTATTTGGGAATCTCATTGCTTTGTCATTGGGTTTGACCCCTAATTTTAAATCAAATTTTGATTTGGCAGAAGATGCTAAATTACAGCTTTCAAAAGATACTTACGATGATGATTTAGATAATTTATTGGCGCAAATTGGAGATCAATATGCTGATTTGTTTTTGGCAGCTAAGAATTTATCAGATGCTATTTTACTTTCAGATATCCTAAGAGTAAATACTGAAATAACTAAGGCTCCCCTATCAGCTTCAATGATTAAACGCTACGATGAACATCATCAAGACTTGACTCTTTTAAAAGCTTTAGTTCGACAACAACTTCCAGAAAAGTATAAAGAAATCTTTTTTGATCAATCAAAAAACGGATATGCAGGTTATATTGATGGGGGAGCTAGCCAAGAAGAATTTTATAAATTTATCAAACCAATTTTAGAAAAAATGGATGGTACTGAGGAATTATTGGTGAAACTAAATCGTGAAGATTTGCTGCGCAAGCAACGGACCTTTGACAACGGCTCTATTCCCCATCAAATTCACTTGGGTGAGCTGCATGCTATTTTGAGAAGACAAGAAGACTTTTATCCATTTTTAAAAGACAATCGTGAGAAGATTGAAAAAATCTTGACTTTTCGAATTCCTTATTATGTTGGTCCATTGGCGCGTGGCAATAGTCGTTTTGCATGGATGACTCGGAAGTCTGAAGAAACAATTACCCCATGGAATTTTGAAGAAGTTGTCGATAAAGGTGCTTCAGCTCAATCATTTATTGAACGCATGACAAACTTTGATAAAAATCTTCCAAATGAAAAAGTACTACCAAAACATAGTTTGCTTTATGAGTATTTTACGGTTTATAACGAATTGACAAAGGTCAAATATGTTACTGAAGGAATGCGAAAACCAGCATTTCTTTCAGGTGAACAGAAGAAAGCCATTGTTGATTTACTCTTCAAAACAAATCGAAAAGTAACCGTTAAGCAATTAAAAGAAGATTATTTCAAAAAAATAGAATGTTTTGATAGTGTTGAAATTTCAGGAGTTGAAGATAGATTTAATGCTTCATTAGGTACCTACCATGATTTGCTAAAAATTATTAAAGATAAAGATTTTTTGGATAATGAAGAAAATGAAGATATCTTAGAGGATATTGTTTTAACATTGACCTTATTTGAAGATAGGGAGATGATTGAGGAAAGACTTAAAACATATGCTCACCTCTTTGATGATAAGGTGATGAAACAGCTTAAACGTCGCCGTTATACTGGTTGGGGACGTTTGTCTCGAAAATTGATTAATGGTATTAGGGATAAGCAATCTGGCAAAACAATATTAGATTTTTTGAAATCAGATGGTTTTGCCAATCGCAATTTTATGCAGCTGATCCATGATGATAGTTTGACATTTAAAGAAGACATTCAAAAAGCACAAGTGTCTGGACAAGGCGATAGTTTACATGAACATATTGCAAATTTAGCTGGTAGCCCTGCTATTAAAAAAGGTATTTTACAGACTGTAAAAGTTGTTGATGAATTGGTCAAAGTAATGGGGCGGCATAAGCCAGAAAATATCGTTATTGAAATGGCACGTGAAAATCAGACAACTCAAAAGGGCCAGAAAAATTCGCGAGAGCGTATGAAACGAATCGAAGAAGGTATCAAAGAATTAGGAAGTCAGATTCTTAAAGAGCATCCTGTTGAAAATACTCAATTGCAAAATGAAAAGCTCTATCTCTATTATCTCCAAAATGGAAGAGACATGTATGTGGACCAAGAATTAGATATTAATCGTTTAAGTGATTATGATGTCGATCACATTGTTCCACAAAGTTTCCTTAAAGACGATTCAATAGACAATAAGGTCTTAACGCGTTCTGATAAAAATCGTGGTAAATCGGATAACGTTCCAAGTGAAGAAGTAGTCAAAAAGATGAAAAACTATTGGAGACAACTTCTAAACGCCAAGTTAATCACTCAACGTAAGTTTGATAATTTAACGAAAGCTGAACGTGGAGGTTTGAGTGAACTTGATAAAGCTGGTTTTATCAAACGCCAATTGGTTGAAACTCGCCAAATCACTAAGCATGTGGCACAAATTTTGGATAGTCGCATGAATACTAAATACGATGAAAATGATAAACTTATTCGAGAGGTTAAAGTGATTACCTTAAAATCTAAATTAGTTTCTGACTTCCGAAAAGATTTCCAATTCTATAAAGTACGTGAGATTAACAATTACCATCATGCCCATGATGCGTATCTAAATGCCGTCGTTGGAACTGCTTTGATTAAGAAATATCCAAAACTTGAATCGGAGTTTGTCTATGGTGATTATAAAGTTTATGATGTTCGTAAAATGATTGCTAAGTCTGAGCAAGAAATAGGCAAAGCAACCGCAAAATATTTCTTTTACTCTAATATCATGAACTTCTTCAAAACAGAAATTACACTTGCAAATGGAGAGATTCGCAAACGCCCTCTAATCGAAACTAATGGGGAAACTGGAGAAATTGTCTGGGATAAAGGGCGAGATTTTGCCACAGTGCGCAAAGTATTGTCCATGCCCCAAGTCAATATTGTCAAGAAAACAGAAGTACAGACAGGCGGATTCTCCAAGGAGTCAATTTTACCAAAAAGAAATTCGGACAAGCTTATTGCTCGTAAAAAAGACTGGGATCCAAAAAAATATGGTGGTTTTGATAGTCCAACGGTAGCTTATTCAGTCCTAGTGGTTGCTAAGGTGGAAAAAGGGAAATCGAAGAAGTTAAAATCCGTTAAAGAGTTACTAGGGATCACAATTATGGAAAGAAGTTCCTTTGAAAAAAATCCGATTGACTTTTTAGAAGCTAAAGGATATAAGGAAGTTAAAAAAGACTTAATCATTAAACTACCTAAATATAGTCTTTTTGAGTTAGAAAACGGTCGTAAACGGATGCTGGCTAGTGCCGGAGAATTACAAAAAGGAAATGAGCTGGCTCTGCCAAGCAAATATGTGAATTTTTTATATTTAGCTAGTCATTATGAAAAGTTGAAGGGTAGTCCAGAAGATAACGAACAAAAACAATTGTTTGTGGAGCAGCATAAGCATTATTTAGATGAGATTATTGAGCAAATCAGTGAATTTTCTAAGCGTGTTATTTTAGCAGATGCCAATTTAGATAAAGTTCTTAGTGCATATAACAAACATAGAGACAAACCAATACGTGAACAAGCAGAAAATATTATTCATTTATTTACGTTGACGAATCTTGGAGCTCCCGCTGCTTTTAAATATTTTGATACAACAATTGATCGTAAACGATATACGTCTACAAAAGAAGTTTTAGATGCCACTCTTATCCATCAATCCATCACTGGTCTTTATGAAACACGCATTGATTTGAGTCAGCTAGGAGGTGACTGA

SEQ ID NO: 81 - protein, 1368 aa, Streptococcus pyogenes [sequence omitted]

SEQ ID NO: 82 - protein, 1378 aa, Lactobacillus fermentum
MKEYHIGLDIGTSSIGWAVTDSQFKLMRIKGKTAIGVRLFEEGKTAAERRTFRTTRRRLKRRKWRLHYLDEIFAPHLQEVDENFLRRLKQSNIHPEDPTKNQAFIGKLLFPDLLKKNERGYPTLIKMRDELPVEQRAHYPVMNIYKLREAMINEDRQFDLREVYLAVHHIVKYRGHFLNNASVDKFKVGRIDFDKSFNVLNEAYEELQNGEGSFTIEPSKVEKIGQLLLDTKMRKLDRQKAVAKLLEVKVADKEETKRNKQIATAMSKLVLGYKADFATVAMANGNEWKIDLSSETSEDEIEKFREELSDAQNDILTEITSLFSQIMLNEIVPNGMSISESMMDRYWTHERQLAEVKEYLATQPASARKEFDQVYNKYIGQAPKERGFDLEKGLKKILSKKENWKEIDELLKAGDFLPKQRTSANGVIPHQMHQQELDRIIEKQAKYYPWLATENPATGERDRHQAKYELDQLVSFRIPYYVGPLVTPEVQKATSGAKFAWAKRKEDGEITPWNLWDKIDRAESAEAFIKRMTVKDTYLLNEDVLPANSLLYQKYNVLNELNNVRVNGRRLSVGIKQDIYTELFKKKKTVKASDVASLVMAKTRGVNKPSVEGLSDPKKFNSNLATYLDLKSIVGDKVDDNRYQTDLENIIEWRSVFEDGEIFADKLTEVEWLTDEQRSALVKKRYKGWGRLSKKLLTGIVDENGQRIIDLMWNTDQNFKEIVDQPVFKEQIDQLNQKAITNDGMTLRERVESVLDDAYTSPQNKKAIWQVVRVVEDIVKAVGNAPKSISIEFARNEGNKGEITRSRRTQLQKLFEDQAHELVKDTSLTEELEKAPDLSDRYYFYFTQGGKDMYTGDPINFDEISTKYDIDHILPQSFVKDNSLDNRVLTSRKENNKKSDQVPAKLYAAKMKPYWNQLLKQGLITQRKFENLTKDVDQNIKYRSLGFVKRQLVETRQVIKLTANILGSMYQEAGTEIIETRAGLTKQLREEFDLPKVREVNDYHHAVDAYLTTFAGQYLNRRYPKLRSFFVYGEYMKFKHGSDLKLRNFNFFHELMEGDKSQGKVVDQQTGELITTRDEVAKSFDRLLNMKYMLVSKEVHDRSDQLYGATIVTAKESGKLTSPIEIKKNRLVDLYGAYTNGTSAFMTIIKFTGNKPKYKVIGIPTTSAASLKRAGKPGSESYNQELHRIIKSNPKVKKGFEIVVPHVSYGQLIVDGDCKFTLASPTVQHPATQLVLSKKSLETISSGYKILKDKPAIANERLIRVFDEVVGQMNRYFTIFDQRSNRQKVADARDKFLSLPTESKYEGAKKVQVGKTEVITNLLMGLHANATQGDLKVLGLATFGFFQSTTGLSLSEDTMIVYQSPTGLFERRICLKDI

SEQ ID NO: 83 - protein, 1368 aa, Staphylococcus aureus [sequence omitted]

SEQ ID NO: 84 - protein, 1053 aa, Staphylococcus aureus
MGKRNYILGLDIGITSVGYGIIDYETRDVIDAGVRLFKEANVENNEGRRSKRGARRLKRRRRHRIQRVKKLLFDYNLLTDHSELSGINPYEARVKGLSQKLSEEEFSAALLHLAKRRGVHNVNEVEEDTGNELSTKEQISRNSKALEEKYVAELQLERLKKDGEVRGSINRFKTSDYVKEAKQLLKVQKAYHQLDQSFIDTYIDLLETRRTYYEGPGEGSPFGWKDIKEWYEMLMGHCTYFPEELRSVKYAYNADLYNALNDLNNLVITRDENEKLEYYEKFQIIENVFKQKKKPTLKQIAKEILVNEEDIKGYRVTSTGKPEFTNLKVYHDIKDITARKEIIENAELLDQIAKILTIYQSSEDIQEELTNLNSELTQEEIEQISNLKGYTGTHNLSLKAINLILDELWHTNDNQIAIFNRLKLVPKKVDLSQQKEIPTTLVDDFILSPVVKRSFIQSIKVINAIIKKYGLPNDIIIELAREKNSKDAQKMINEMQKRNRQTNERIEEIIRTTGKENAKYLIEKIKLHDMQEGKCLYSLEAIPLEDLLNNPFNYEVDHIIPRSVSFDNSFNNKVLVKQEENSKKGNRTPFQYLSSSDSKISYETFKKHILNLAKGKGRISKTKKEYLLEERDINRFSVQKDFINRNLVDTRYATRGLMNLLRSYFRVNNLDVKVKSINGGFTSFLRRKWKFKKERNKGYKHHAEDALIIANADFIFKEWKKLDKAKKVMENQMFEEKQAESMPEIETEQEYKEIFITPHQIKHIKDFKDYKYSHRVDKKPNRKLINDTLYSTRKDDKGNTLIVNNLNGLYDKDNDKLKKLINKSPEKLLMYHHDPQTYQKLKLIMEQYGDEKNPLYKYYEETGNYLTKYSKKDNGPVIKKIKYYGNKLNAHLDITDDYPNSRNKVVKLSLKPYRFDVYLDNGVYKFVTVKNLDVIKKENYYEVNSKCYEEAKKLKKISNQAEFIASFYKNDLIKINGELYRVIGVNNDLLNRIEVNMIDITYREYLENMNDKRPPHIIKTIASKTQSIKKYSTDILGNLYEVKSKKHPQIIKK

SEQ ID NO: 85 - protein, 1409 aa, Streptococcus thermophilus
MLFNKCIIISINLDFSNKEKCMTKPYSIGLDIGTNSVGWAVITDNYKVPSKKMKVLGNTSKKYIKKNLLGVLLFDSGITAEGRRLKRTARRRYTRRRNRILYLQEIFSTEMATLDDAFFQRLDDSFLVPDDKRDSKYPIFGNLVEEKVYHDEFPTIYHLRKYLADSTKKADLRLVYLALAHMIKYRGHFLIEGEFNSKNNDIQKNFQDFLDTYNAIFESDLSLENSKQLEEIVKDKISKLEKKDRILKLFPGEKNSGIFSEFLKLIVGNQADFRKCFNLDEKASLHFSKESYDEDLETLLGYIGDDYSDVFLKAKKLYDAILLSGFLTVTDNETEAPLSSAMIKRYNEHKEDLALLKEYIRNISLKTYNEVFKDDTKNGYAGYIDGKTNQEDFYVYLKNLLAEFEGADYFLEKIDREDFLRKQRTFDNGSIPYQIHLQEMRAILDKQAKFYPFLAKNKERIEKILTFRIPYYVGPLARGNSDFAWSIRKRNEKITPWNFEDVIDKESSAEAFINRMTSFDLYLPEEKVLPKHSLLYETFNVYNELTKVRFIAESMRDYQFLDSKQKKDIVRLYFKDKRKVTDKDIIEYLHAIYGYDGIELKGIEKQFNSSLSTYHDLLNIINDKEFLDDSSNEAIIEEIIHTLTIFEDREMIKQRLSKFENIFDKSVLKKLSRRHYTGWGKLSAKLINGIRDEKSGNTILDYLIDDGISNRNFMQLIHDDALSFKKKIQKAQIIGDEDKGNIKEVVKSLPGSPAIKKGILQSIKIVDELVKVMGGRKPESIVVEMARENQYTNQGKSNSQQRLKRLEKSLKELGSKILKENIPAKLSKIDNNALQNDRLYLYYLQNGKDMYTGDDLDIDRLSNYDIDHIIPQAFLKDNSIDNKVLVSSASNRGKSDDFPSLEVVKKRKTFWYQLLKSKLISQRKFDNLTKAERGGLLPEDKAGFIQRQLVETRQITKHVARLLDEKFNNKKDENNRAVRTVKIITLKSTLVSQFRKDFELYKVREINDFHHAHDAYLNAVIASALLKKYPKLEPEFVYGDYPKYNSFRERKSATEKVYFYSNIMNIFKKSISLADGRVIERPLIEVNEETGESVWNKESDLATVRRVLSYPQVNVVKKVEEQNHGLDRGKPKGLFNANLSSKPKPNSNENLVGAKEYLDPKKYGGYAGISNSFAVLVKGTIEKGAKKKITNVLEFQGISILDRINYRKDKLNFLLEKGYKDIELIIELPKYSLFELSDGSRRMLASILSTNNKRGEIHKGNQIFLSQKFVKLLYHAKRISNTINENHRKYVENHKKEFEELFYYILEFNENYVGAKKNGKLLNSAFQSWQNHSIDELCSSFIGPTGSERKGLFELTSRGSAADFEFLGVKIPRYRDYTPSSLLKDATLIHQSVTGLYETRIDLAKLGEG

SEQ ID NO: 86 - protein, 1403 aa, Lactobacillus crispatus
MKIKNYNLALTPSTSAVGHVEVDDDLNILEPVHHQKAIGVAKFGEGETAEARRLARSARRTTKRRANRINHYFNEIMKPEIDKVDPLMFDRIKQAGLSPLDERKEFRTVIFDRPNIASYYHNQFPTIWHLQKYLMITDEKADIRLIYWALHSLLKHRGHFFNTTPMSQFKPGKLNLKDDMLALDDYNDLEGLSFAVANSPEIEKVIKDRSMHKKEKIAELKKLIVNDVPDKDLAKRNNKIITQIVNAIMGNSFHLNFIFDMDLDKLTSKAWSFKLDDPELDTKFDAISGSMTDNQIGIFETLQKIYSAISLLDILNGSSNVVDAKNALYDKHKRDLNLYFKFLNTLPDEIAKTLKAGYTLYIGNRKKDLLAARKLLKVNVAKNFSQDDFYKLINKELKSIDKQGLQTRFSEKVGELVAQNNFLPVRQRSSDNVFIPYQLNAITFNKILENQGKYYDFLVKPNPAKKDRKNAPYELSQLMQFTIPYYVGPLVTPEEQVKSGIPKTSRFAWMVRKDNGAITPWNFYDKVDIEATADKFIKRSIAKDSYLLSELVLPKHSLLYEKYEVFNELSNVSLDGKKLSGGVKQILFNEVFKKTNKVNTSRILKALAKHNIPGSKITGLSNPEEFTSSLQTYNAWKKYFPNQIDNFAYQQDLEKMIEWSTVFEDHKILAKKLDEIEWLDDDQKKFVANTRLRGWGRLSKRLLTGLKDNYGKSIMQRLETTKANFQQIVYKPEFREQIDKISQAAAKNQSLEDILANSYTSPSNRKAIRKTMSVVDEYIKLNHGKEPDKIFLMFQRSEQEKGKQTEARSKQLNRILSQLKADKSANKLFSKQLADEFSNAIKKSKYKLNDKQYFYFQQLGRDALTGEVIDYDELYKYTVLHIIPRSKLTDDSQNNKVLTKYKIVDGSVALKFGNSYSDALGMPIKAFWTELNRLKLIPKGKLLNLTTDFSTLNKYQRDGYIARQLVETQQIVKLLATIMQSRFKHTKIIEVRNSQVANIRYQFDYFRIKNLNEYYRGFDAYLAAVVGTYLYKVYPKARRLFVYGQYLKPKKTNQENQDMHLDSEKKSQGFNFLWNLLYGKQDQIFVNGTDVIAFNRKDLITKMNTVYNYKSQKISLAIDYHNGAMFKATLFPRNDRDTAKTRKLIPKKKDYDTDIYGGYTSNVDGYMLLAEIIKRDGNKQYGFYGVPSRLVSELDTLKKTRYTEYEEKLKEIIKPELGVDLKKIKKIKILKNKVPFNQVIIDKGSKFFITSTSYRWNYRQLILSAESQQTLMDLVVDPDFSNHKARKDARKNADERLIKVYEEILYQVKNYMPMFVELHRCYEKLVDAQKTFKSLKISDKAMVLNQILILLHSNATSPVLEKLGYHTRFTLGKKHNLISENAVLVTQSITGLKENHVSIKQML

SEQ ID NO: 87 - protein, 1386 aa, Pedicoccus damnosus
MTNEKYSIGLDIGTSSIGFAVVNDNNRVIRVKGKNAIGVRLFDEGKAAADRRSFRTTRRSFRTTRRRLSRRRWRLKLLREIFDAYITPVDEAFFIRLKESNLSPKDSKKQYSGDILFNDRSDKDFYEKYPTIYHLRNALMTEHRKFDVREIYLAIHHIMKFRGHFLNATPANNFKVGRLNLEEKFEELNDIYQRVFPDESIEFRTDNLEQIKEVLLDNKRSRADRQRTLVSDIYQSSEDKDIEKRNKAVATEILKASLGNKAKLNVITNVEVDKEAAKEWSITFDSESIDDDLAKIEGQMTDDGHEIIEVLRSLYSGITLSAIVPENHTLSQSMVAKYDLHKDHLKLFKKLINGMTDTKKAKNLRAAYDGYIDGVKGKVLPQEDFYKQVQVNLDDSAEANEIQTYIDQDIFMPKQRTKANGSIPHQLQQQELDQIIENQKAYYPWLAELNPNPDKKRQQLAKYKLDELVTFRVPYYVGPMITAKDQKNQSGAEFAWMIRKEPGNITPWNFDQKVDRMATANQFIKRMTTTDTYLLGEDVLPAQSLLYQKFEVLNELNKIRIDHKPISIEQKQQIFNDLFKQFKNVTIKHLQDYLVSQGQYSKRPLIEGLADEKRFNSSLSTYSDLCGIFGAKLVEENDRQEDLEKIIEWSTIFEDKKIYRAKLNDLTWLTDDQKEKLATKRYQGWGRLSRKLLVGLKNSEHRNIMDILWITNENFMQIQAEPDFAKLVTDANKGMLEKTDSQDVINDLYTSPQNKKAIRQILLVVHDIQNAMHGQAPAKIHVEFARGEERNPRRSVRQRQRQVEAAYEKVSNELVSAKVRQEFKEAINNKRDFKDRLFLYFMQGGIDIYTGKQLNIDQLSSYQIDHILPQAFVKDDSLTNRVLTNENQVKADSVPIDIFGKKMLSVWGRMKDQGLISKGKYRNLTMNPENISAHTENGFINRQLVETRQVIKLAVNILADEYGDSTQIISVKADLSHQMREDFELLKNRDVNDYHHAFDAYLAAFIGNYLLKRYPKLESYFVYGDFKKFTQKETKMRRFNFIYDLKHCDQVVNKETGEILWTKDEDIKYIRHLFAYKKILVSHEVREKRGALYNQTIYKAKDDKGSGQESKKLIRIKDDKETKIYGGYSGKSLAYMTIVQITKKNKVSYRVIGIPTLALARLNKLENDSTENNGELYKIIKPQFTHYKVDKKNGEIIETTDDFKIVVSKVRFQQLIDDAGQFFMLASDTYKNNAQQLVISNNALKAINNTNITDCPRDDLERLDNLRLDSAFDEIVKKMDKYFSAYDANNFREKIRNSNLIFYQLPVEDQWENNKITELGKRTVLTRILQGLHANATTTDMSIFKIKTPFGQLRQRSGISLSENAQLIYQSPTGLFERRVQLNKIK

SEQ ID NO: 88 - protein, 1368 aa, Fusobaterium nucleatum
MKKQKFSDYYLGFDIGTNSVGWCVTDLDYNVLRFNKKDMWGSRLFEEAKTAAERRVRQRNSRRRLKRRKWRLNLLEEIFSNEILKIDSNFFRRLKESSLWLEDKSSKEKFTLFNDDNYKDYDFYKQYPTIFHLRNELIKNPEKKDIRLVYLAIHSIFKSRGHFLFEGQNLKEIKNFETLYNNLIAFLEDNGINKIIDKNNIEKLEKIVCDSKKGLKDKEKEFKEIFNSDKQLVAIFKLSVGSSVSLNDLFDTDEYKKGEVEKEKISFREQIYEDDKPIYYSILGEKIELLDIAKTFYDFMVLNNILADSQYISEAKVKLYEEHKKDLKNLKYIIRKYNKGNYDKLFKDKNENNYSAYIGLNKEKSKKEVIEKSRLKIDDLIKNIKGYLPKVEEIEEKDKAIFNKILNKIELKTILPKQRISDNGTLPYQIHEAELEKILENQSKYYDFLNYEENGIITKDKLLMTFKFRIPYYVGPLNSYHKDKGGNSWIVRKEEGKILPWNFEQKVDIEKSAEEFIKRMTNKCTYLNGEDVIPKDTFLYSEYVILNELNKVQVNDEFLNEENKRKIIDELFKENKKVSEKKFKEYLLVKQIVDGTIELKGVKDSFNSNYISYIRFKDIFGEKLNLDIYKEISEKSILWKCLYGDDKKIFEKKIKNEYGDILTKDEIKKINTFKFNNWGRLSEKLLTGIEFINLETGECYSSVMDALRRTNYNLMELLSSKFTLQESINNENKEMNEASYRDLIEESYVSPSLKRAIFQTLKIYEEIRKITGRVPKKVFIEMARGGDESMKNKKIPARQEQLKKLYDSCGNDIANFSIDIKEMKNSLISYDNNSLRQKKLYLYYLQFGKCMYTGREIDLDRLLQNNDTYDIDHIYPRSKVIKDDSFDNLVLVLKNENAEKSNEYPVKKEIQEKMKSFWRFLKEKNFISDEKYKRLTGKDDFELRGFMARQLVNVRQTTKEVGKILQQIEPEIKIVYSKAEIASSFREMFDFIKVRELNDTHHAKDAYLNIVAGNVYNTKFTEKPYRYLQEIKENYDVKKIYNYDIKNAWDKENSLEIVKKNMEKNTVNITRFIKEKKGQLFDLNPIKKGETSNEIISIKPKVYNGKDDKLNEKYGYYKSLNPAYFLYVEHKEKNKRIKSFERVNLVDVNNIKDEKSLVKYLIENKKLVEPRVIKKVYKRQVILINDYPYSIVTLDSNKLMDFENLKPLFLENKYEKILKNVIKFLEDNQGKSEENYKFIYLKKKDRYEKNETLESVKDRYNLEFNEMYDKFLEKLDSKDYKNYMNNKKYQELLDVKEKFIKLNLFDKAFTLKSFLDLFNRKTMADFSKVGLTKYLGKIQKISSNVLSKNELYLLEESVTGLFVKKIKL

SEQ ID NO: 89 - protein, 1286 aa, Enterococcus cecorum
RRKQRIQILQELLGEEVLKTDPGFFHRMKESRYVVEDKRTLDGKQVELPYALFVDKDYTDKEYYKQFPTINHLIVYLMTTSDTPDIRLVYLALHYYMKNRGNFLHSGDINNVKDINDILEQLDNVLETFLDGWNLKLKSYVEDIKNIYNRDLGRGERKKAFVNTLGAKTKAEKAFCSLISGGSTNLAELFDDSSLKEIETPKIEFASSSLEDKIDGIQEALEDRFAVIEAAKRLYDWKTLTDILGDSSSLAEARVNSYQMHHEQLLELKSLVKEYLDRKVFQEVFVSLNVANNYPAYIGHTKINGKKKELEVKRTKRNDFYSYVKKQVIEPIKKKVSDEAVLTKLSEIESLIEVDKYLPLQVNSDNGVIPYQVKLNELTRIFDNLENRIPVLRENRDKIIKTFKFRIPYYVGSLNGVVKNGKCTNWMVRKEEGKIYPWNFEDKVDLEASAEQFIRRMTNKCTYLVNEDVLPKYSLLYSKYLVLSELNNLRIDGRPLDVKIKQDIYENVFKKNRKVTLKKIKKYLLKEGIITDDDELSGLADDVKSSLTAYRDFKEKLGHLDLSEAQMENIILNITLFGDDKKLLKKRLAALYPFIDDKSLNRIATLNYRDWGRLSERFLSGITSVDQETGELRTIIQCMYETQANLMQLLAEPYHFVEAIEKENPKVDLESISYRIVNDLYVSPAVKRQIWQTLLVIKDIKQVMKHDPERIFIEMAREKQESKKTKSRKQVLSEVYKKAKEYEHLFEKLNSLTEEQLRSKKIYLYFTQLGKCMYSGEPIDFENLVSANSNYDIDHIYPQSKTIDDSFNNIVLVKKSLNAYKSNHYPIDKNIRDNEKVKTLWNTLVSKGLITKEKYERLIRSTPFSDEELAGFIARQLVETRQSTKAVAEILSNWFPESEIVYSKAKNVSNFRQDFEILKVRELNDCHHAHDAYLNIVVGNAYHTKFTNSPYRFIKNKANQEYNLRKLLQKVNKIESNGVVAWVGQSENNPGTIATVKKVIRRNTVLISRMVKEVDGQLFDLTLMKKGKGQVPIKSSDERLTDISKYGGYNKATGAYFTFVKSKKRGKVVRSFEYVPLHLSKQFENNNELLKEYIEKDRGLTDVEILIPKVLINSLFRYNGSLVRITGRGDTRLLLVHEQPLYVSNSFVQQLKSVSSYKLKKSENDNAKLTKTATEKLSNIDELYDGLLRKLDLPIYSYWFSSIKEYLVESRTKYIKLSIEEKALVIFEILHLFQSDAQVPNLKILGLSTKPSRIRIQKNLKDTDKMSIIHQSPSGIFEHEIELTSL

SEQ ID NO: 90 - protein, 1312 aa, Anaerostipes hadrus
MQNGFLGITVSSEQVGWAVTNPKYELERASRKDLWGVRLFDKAETAEDRRMFRTNRRLNQRKKNRIHYLRDIFHEEVNQKDPNFFQQLDESNFCEDDRTVEFNFDTNLYKNQFPTVYHLRKYLMETKDKPDIRLVYLAFSKFMKNRGHFLYKGNLGEVMDFENSMKGFCESLEKFNIDFPTLSDEQVKEVRDILCDHKIAKTVKKKNIITITKVKSKTAKAWIGLFCGCSVPVKVLFQDIDEEIVTDPEKISFEDASYDDYIANIEKGVGIYYEAIVSAKMLFDWSILNEILGDHQLLSDAMIAEYNKHHDDLKRLQKIIKGTGSRELYQDIFINDVSGNYVCYVGHAKTMSSADQKQFYTFLKNRLKNVNGISSEDAEWIDTEIKNGTLLPKQTKRDNSVIPHQLQLREFELILDNMQEMYPFLKENREKLLKIFNFVIPYYVGPLKGVVRKGESTNWMVPKKDGVIHPWNFDEMVDKEASAECFISRMTGNCSYLFNEKVLPKNSLLYETFEVLNELNPLKINGEPISVELKQRIYEQLFLTGKKVTKKSLTKYLIKNGYDKDIELSGIDNEFHSNLKSHIDFEDYDNLSDEEVEQIILRITVFEDKQLLKDYLNREFVKLSEDERKQICSLSYKGWGNLSEMLLNGITVTDSNGVEVSVMDMLWNTNLNLMQILSKKYGYKAEIEHYNKEHEKTIYNREDLMDYLNIPPAQRRKVNQLITIVKSLKKTYGVPNKIFFKISREHQDDPKRTSSRKEQLKYLYKSLKSEDEKHLMKELDELNDHELSNDKVYLYFLQKGRCIYSGKKLNLSRLRKSNYQNDIDYIYPLSAVNDRSMNNKVLTGIQENRADKYTYFPVDSEIQKKMKGFWMELVLQGFMTKEKYFRLSRENDFSKSELVSFIEREISDNQQSGRMIASVLQYYFPESKIVFVKEKLISSFKRDFHLISSYGHNHLQAAKDAYITIVVGNVYHTKFTMDPAIYFKNHKRKDYDLNRLFLENISRDGQIAWESGPYGSIQTVRKEYAQNHIAVTKRVVEVKGGLFKQMPLKKGHGEYPLKTNDPRFGNIAQYGGYTNVTGSYFVLVESMEKGKKRISLEYVPVYLHERLEDDPGHKLLKEYLVDHRKLNHPKILLAKVRKNSLLKIDGFYYRLNGRSGNALILTNAVELIMDDWQTKTANKISGYMKRRAIDKKARVYQNEFHIQELEQLYDFYLDKLKNGVYKNRKNNQAELIHNEKEQFMELKTEDQCVLLTEIKKLFVCSPMQADLTLIGGSKHTGMIAMSSNVTKADFAVIAEDPLGLRNKVIYSHKGEK

SEQ ID NO: 91 - protein, 1344 aa, Kandleria vitulina
MSQNNNKIYNIGLDIGDASVGWAVVDEHYNLLKRHGKHMWGSRLFTQANTAVERRSSRSTRRRYNKRRERIRLLREIMEDMVLDVDPTFFIRLANVSFLDQEDKKDYLKENYHSNYNLFIDKDFNDKTYYDKYPTIYHLRKHLCESKEKEDPRLIYLALHHIVKYRGNFLYEGQKFSMDVSNIEDKMIDVLRQFNEINLFEYVEDRKKIDEVLNVLKEPLSKKHKAEKAFALFDTTKDNKAAYKELCAALAGNKFNVTKMLKEAELHDEDEKDISFKFSDATFDDAFVEKQPLLGDCVEFIDLLHDIYSWVELQNILGSAHTSEPSISAAMIQRYEDHKNDLKLLKDVIRKYLPKKYFEVFRDEKSKKNNYCNYINHPSKTPVDEFYKYIKKLIEKIDDPDVKTILNKIELESFMLKQNSRTNGAVPYQMQLDELNKILENQSVYYSDLKDNEDKIRSILTFRIPYYFGPLNITKDRQFDWIIKKEGKENERILPWNANEIVDVDKTADEFIKRMRNFCTYFPDEPVMAKNSLTVSKYEVLNEINKLRINDHLIKRDMKDKMLHTLFMDHKSISANAMKKWLVKNQYFSNTDDIKIEGFQKENACSTSLTPWIDFTKIFGKINESNYDFIEKIIYDVTVFEDKKILRRRLKKEYDLDEEKIKKILKLKYSGWSRLSKKLLSGIKTKYKDSTRTPETVLEVMERTNMNLMQVINDEKLGFKKTIDDANSTSVSGKFSYAEVQELAGSPAIKRGIWQALLIVDEIKKIMKHEPAHVYIEFARNEDEKERKDSFVNQMLKLYKDYDFEDETEKEANKHLKGEDAKSKIRSERLKLYYTQMGKCMYTGKSLDIDRLDTYQVDHIVPQSLLKDDSIDNKVLVLSSENQRKLDDLVIPSSIRNKMYGFWEKLFNNKIISPKKFYSLIKTEFNEKDQERFINRQIVETRQITKHVAQIIDNHYENTKVVTVRADLSHQFRERYHIYKNRDINDFHHAHDAYIATILGTYIGHRFESLDAKYIYGEYKRIFRNQKNKGKEMKKNNDGFILNSMRNIYADKDTGEIVWDPNYIDRIKKCFYYKDCFVTKKLEENNGTFFNVTVLPNDTNSDKDNTLATVPVNKYRSNVNKYGGFSGVNSFIVAIKGKKKKGKKVIEVNKLTGIPLMYKNADEEIKINYLKQAEDLEEVQIGKEILKNQLIEKDGGLYYIVAPTEIINAKQLILNESQTKLVCEIYKAMKYKNYDNLDSEKIIDLYRLLINKMELYYPEYRKQLVKKFEDRYEQLKVISIEEKCNIIKQILATLHCNSSIGKIMYSDFKISTTIGRLNGRTISLDDISFIAESPTGMYSKKYKL

SEQ ID NO: 92 - protein, 1288 aa, Enterococcus faecalis
MRLFEEGHTAEDRRLKRTARRRISRRRNRLRYLQAFFEEAMTDLDENFFARLQESFLVPEDKKWHRHPIFAKLEDEVAYHETYPTIYHLRKKLADSSEQADLRLIYLALAHIVKYRGHFLIEGKLSTENTSVKDQFQQFMVIYNQTFVNGESRLVSAPLPESVLIEEELTEKASRTKKSEKVLQQFPQEKANGLFGQFLKLMVGNKADFKKVFGLEEEAKITYASESYEEDLEGILAKVGDEYSDVFLAAKNVYDAVELSTILADSDKKSHAKLSSSMIVRFTEHQEDLKKFKRFIRENCPDEYDNLFKNEQKDGYAGYIAHAGKVSQLKFYQYVKKIIQDIAGAEYFLEKIAQENFLRKQRTFDNGVIPHQIHLAELQAIIHRQAAYYPFLKENQEKIEQLVTFRIPYYVGPLSKGDASTFAWLKRQSEEPIRPWNLQETVDLDQSATAFIERMTNFDTYLPSEKVLPKHSLLYEKFMVFNELTKISYTDDRGIKANFSGKEKEKIFDYLFKTRRKVKKKDIIQFYRNEYNTEIVTLSGLEEDQFNASFSTYQDLLKCGLTRAELDHPDNAEKLEDIIKILTIFEDRQRIRTQLSTFKGQFSAEVLKKLERKHYTGWGRLSKKLINGIYDKESGKTILDYLVKDDGVSKHYNRNFMQLINDSQLSFKNAIQKAQSSEHEETLSETVNELAGSPAIKKGIYQSLKIVDELVAIMGYAPKRIVVEMARENQTTSTGKRRSIQRLKIVEKAMAEIGSNLLKEQPTTNEQLRDTRLFLYYMQNGKDMYTGDELSLHRLSHYDIDHIIPQSFMKDDSLDNLVLVGSTENRGKSDDVPSKEVVKDMKAYWEKLYAAGLISQRKFQRLTKGEQGGLTLEDKAHFIQRQLVETRQITKNVAGILDQRYNAKSKEKKVQIITLKASLTSQFRSIFGLYKVREVNDYHHGQDAYLNCVVATTLLKVYPNLAPEFVYGEYPKFQTFKENKATAKAIIYTNLLRFFTEDEPRFTKDGEILWSNSYLKTIKKELNYHQMNIVKKVEVQKGGFSKESIKPKGPSNKLIPVKNGLDPQKYGGFDSPVVAYTVLFTHEKGKKPLIKQEILGITIMEKTRFEQNPILFLEEKGFLRPRVLMKLPKYTLYEFPEGRRRLLASAKEAQKGNQMVLPEHLLTLLYHAKQCLLPNQSESLAYVEQHQPEFQEILERVVDFAEVHTLAKSKVQQIVKLFEANQTADVKEIAASFIQLMQFNAMGAPSTFKFFQKDIERARYTSIKEIFDATIIYQSPTGLYETRRKVVD

SEQ ID NO: 93 - protein, 1052 aa, Staphylococcus aureus
KRNYILGLDIGITSVGYGIIDYETRDVIDAGVRLFKEANVENNEGRRSKRGARRLKRRRRHRIQRVKKLLFDYNLLTDHSELSGINPYEARVKGLSQKLSEEEFSAALLHLAKRRGVHNVNEVEEDTGNELSTKEQISRNSKALEEKYVAELQLERLKKDGEVRGSINRFKTSDYVKEAKQLLKVQKAYHQLDQSFIDTYIDLLETRRTYYEGPGEGSPFGWKDIKEWYEMLMGHCTYFPEELRSVKYAYNADLYNALNDLNNLVITRDENEKLEYYEKFQIIENVFKQKKKPTLKQIAKEILVNEEDIKGYRVTSTGKPEFTNLKVYHDIKDITARKEIIENAELLDQIAKILTIYQSSEDIQEELTNLNSELTQEEIEQISNLKGYTGTHNLSLKAINLILDELWHTNDNQIAIFNRLKLVPKKVDLSQQKEIPTTLVDDFILSPVVKRSFIQSIKVINAIIKKYGLPNDIIIELAREKNSKDAQKMINEMQKRNRQTNERIEEIIRTTGKENAKYLIEKIKLHDMQEGKCLYSLEAIPLEDLLNNPFNYEVDHIIPRSVSFDNSFNNKVLVKQEENSKKGNRTPFQYLSSSDSKISYETFKKHILNLAKGKGRISKTKKEYLLEERDINRFSVQKDFINRNLVDTRYATRGLMNLLRSYFRVNNLDVKVKSINGGFTSFLRRKWKFKKERNKGYKHHAEDALIIANADFIFKEWKKLDKAKKVMENQMFEEKQAESMPEIETEQEYKEIFITPHQIKHIKDFKDYKYSHRVDKKPNRELINDTLYSTRKDDKGNTLIVNNLNGLYDKDNDKLKKLINKSPEKLLMYHHDPQTYQKLKLIMEQYGDEKNPLYKYYEETGNYLTKYSKKDNGPVIKKIKYYGNKLNAHLDITDDYPNSRNKVVKLSLKPYRFDVYLDNGVYKFVTVKNLDVIKKENYYEVNSKCYEEAKKLKKISNQAEFIASFYNNDLIKINGELYRVIGVNNDLLNRIEVNMIDITYREYLENMNDKRPPRIIKTIASKTQSIKKYSTDILGNLYEVKSKKHPQIIKKG

SEQ ID NO: 94 - protein, 1082 aa, Geobacillus thermodenitrificans
MKYKIGLDIGITSIGWAVINLDIPRIEDLGVRIFDRAENPKTGESLALPRRLARSARRRLRRRKHRLERIRRLFVREGILTKEELNKLFEKKHEIDVWQLRVEALDRKLNNDELARILLHLAKRRGFRSNRKSERTNKENSTMLKHIEENQSILSSYRTVAEMVVKDPKFSLHKRNKEDNYTNTVARDDLEREIKLIFAKQREYGNIVCTEAFEHEYISIWASQRPFASKDDIEKKVGFCTFEPKEKRAPKATYTFQSFTVWEHINKLRLVSPGGIRALTDDERRLIYKQAFHKNKITFHDVRTLLNLPDDTRFKGLLYDRNTTLKENEKVRFLELGAYHKIRKAIDSVYGKGAAKSFRPIDFDTFGYALTMFKDDTDIRSYLRNEYEQNGKRMENLADKVYDEELIEELLNLSFSKFGHLSLKALRNILPYMEQGEVYSTACERAGYTFTGPKKKQKTVLLPNIPPIANPVVMRALTQARKVVNAIIKKYGSPVSIHIELARELSQSFDERRKMQKEQEGNRKKNETAIRQLVEYGLTLNPTGLDIVKFKLWSEQNGKCAYSLQPIEIERLLEPGYTEVDHVIPYSRSLDDSYTNKVLVLTKENREKGNRTPAEYLGLGSERWQQFETFVLTNKQFSKKKRDRLLRLHYDENEENEFKNRNLNDTRYISRFLANFIREHLKFADSDDKQKVYTVNGRITAHLRSRWNFNKNREESNLHHAVDAAIVACTTPSDIARVTAFYQRREQNKELSKKTDPQFPQPWPHFADELQARLSKNPKESIKALNLGNYDNEKLESLQPVFVSRMPKRSITGAAHQETLRRYIGIDERSGKIQTVVKKKLSEIQLDKTGHFPMYGKESDPRTYEAIRQRLLEHNNDPKKAFQEPLYKPKKNGELGPIIRTIKIIDTTNQVIPLNDGKTVAYNSNIVRVDVFEKDGKYYCVPIYTIDMMKGILPNKAIEPNKPYSEWKEMTEDYTFRFSLYPNDLIRIEFPREKTIKTAVGEEIKIKDLFAYYQTIDSSNGGLSLVSHDNNFSLRSIGSRTLKRFEKYQVDVLGNIYKVRGEKRVGVASSSHSKAGETIRPL

SEQ ID NO: 95 - protein, 1375 aa, Streptococcus Canis
MEKKYSIGLDIGTNSVGWAVITDDYKVPSKKFKVLGNTNRKSIKKNLMGALLFDSGETAEATRLKRTARRRYTRRKNRIRYLQEIFANEMAKLDDSFFQRLEESFLVEEDKKNERHPIFGNLADEVAYHRNYPTIYHLRKKLADSPEKADLRLIYLALAHIIKFRGHFLIEGKLNAENSDVAKLFYQLIQTYNQLFEESPLDEIEVDAKGILSARLSKSKRLEKLIAVFPNEKKNGLFGNIIALALGLTPNFKSNFDLTEDAKLQLSKDTYDDDLDELLGQIGDQYADLFSAAKNLSDAILLSDILRSNSEVTKAPLSASMVKRYDEHHQDLALLKTLVRQQFPEKYAEIFKDDTKNGYAGYVGIGIKHRKRTTKLATQEEFYKFIKPILEKMDGAEELLAKLNRDDLLRKQRTFDNGSIPHQIHLKELHAILRRQEEFYPFLKENREKIEKILTFRIPYYVGPLARGNSRFAWLTRKSEEAITPWNFEEVVDKGASAQSFIERMTNFDEQLPNKKVLPKHSLLYEYFTVYNELTKVKYVTERMRKPEFLSGEQKKAIVDLLFKTNRKVTVKQLKEDYFKKIECFDSVEIIGVEDRFNASLGTYHDLLKIIKDKDFLDNEENEDILEDIVLTLTLFEDREMIEERLKTYAHLFDDKVMKQLKRRHYTGWGRLSRKMINGIRDKQSGKTILDFLKSDGFSNRNFMQLIHDDSLTFKEEIEKAQVSGQGDSLHEQIADLAGSPAIKKGILQTVKIVDELVKVMGHKPENIVIEMARENQTTTKGLQQSRERKKRIEEGIKELESQILKENPVENTQLQNEKLYLYYLQNGRDMYVDQELDINRLSDYDVDHIVPQSFIKDDSIDNKVLTRSVENRGKSDNVPSEEVVKKMKNYWRQLLNAKLITQRKFDNLTKAERGGLSEADKAGFIKRQLVETRQITKHVARILDSRMNTKRDKNDKPIREVKVITLKSKLVSDFRKDFQLYKVRDINNYHHAHDAYLNAVVGTALIKKYPKLESEFVYGDYKVYDVRKMIAKSEQEIGKATAKRFFYSNIMNFFKTEVKLANGEIRKRPLIETNGETGEVVWNKEKDFATVRKVLAMPQVNIVKKTEVQTGGFSKESILSKRESAKLIPRKKGWDTRKYGGFGSPTVAYSILVVAKVEKGKAKKLKSVKVLVGITIMEKGSYEKDPIGFLEAKGYKDIKKELIFKLPKYSLFELENGRRRMLASATELQKANELVLPQHLVRLLYYTQNISATTGSNNLGYIEQHREEFKEIFEKIIDFSEKYILKNKVNSNLKSSFDEQFAVSDSILLSNSFVSLLKYTSFGASGGFTFLDLDVKQGRLRYQTVTEVLDATLIYQSITGLYETRTDLSQLGGD

SEQ ID NO: 96 - DNA, 27 bp, Artificial Sequence
  Synthetic
gcgaatgttattggcttttacagttct

SEQ ID NO: 97 - DNA, 20 bp, Artificial Sequence
  Synthetic
ttgtgttttgtttccagggc

SEQ ID NO: 98 - protein, 1368 aa, Streptococcus pyogenes
  misc_feature (10)..(10): Xaa can be any naturally occurring amino acid
MDKKYSIGLXIGTNSVGWAVITDEYKVPSKKFKVLGNTDRHSIKKNLIGALLFDSGETAEATRLKRTARRRYTRRKNRICYLQEIFSNEMAKVDDSFFHRLEESFLVEEDKKHERHPIFGNIVDEVAYHEKYPTIYHLRKKLVDSTDKADLRLIYLALAHMIKFRGHFLIEGDLNPDNSDVDKLFIQLVQTYNQLFEENPINASGVDAKAILSARLSKSRRLENLIAQLPGEKKNGLFGNLIALSLGLTPNFKSNFDLAEDAKLQLSKDTYDDDLDNLLAQIGDQYADLFLAAKNLSDAILLSDILRVNTEITKAPLSASMIKRYDEHHQDLTLLKALVRQQLPEKYKEIFFDQSKNGYAGYIDGGASQEEFYKFIKPILEKMDGTEELLVKLNREDLLRKQRTFDNGSIPHQIHLGELHAILRRQEDFYPFLKDNREKIEKILTFRIPYYVGPLARGNSRFAWMTRKSEETITPWNFEEVVDKGASAQSFIERMTNFDKNLPNEKVLPKHSLLYEYFTVYNELTKVKYVTEGMRKPAFLSGEQKKAIVDLLFKTNRKVTVKQLKEDYFKKIECFDSVEISGVEDRFNASLGTYHDLLKIIKDKDFLDNEENEDILEDIVLTLTLFEDREMIEERLKTYAHLFDDKVMKQLKRRRYTGWGRLSRKLINGIRDKQSGKTILDFLKSDGFANRNFMQLIHDDSLTFKEDIQKAQVSGQGDSLHEHIANLAGSPAIKKGILQTVKVVDELVKVMGRHKPENIVIEMARENQTTQKGQKNSRERMKRIEEGIKELGSQILKEHPVENTQLQNEKLYLYYLQNGRDMYVDQELDINRLSDYDVDHIVPQSFLKDDSIDNKVLTRSDKNRGKSDNVPSEEVVKKMKNYWRQLLNAKLITQRKFDNLTKAERGGLSELDKAGFIKRQLVETRQITKHVAQILDSRMNTKYDENDKLIREVKVITLKSKLVSDFRKDFQFYKVREINNYHHAHDAYLNAVVGTALIKKYPKLESEFVYGDYKVYDVRKMIAKSEQEIGKATAKYFFYSNIMNFFKTEITLANGEIRKRPLIETNGETGEIVWDKGRDFATVRKVLSMPQVNIVKKTEVQTGGFSKESILPKRNSDKLIARKKDWDPKKYGGFDSPTVAYSVLVVAKVEKGKSKKLKSVKELLGITIMERSSFEKNPIDFLEAKGYKEVKKDLIIKLPKYSLFELENGRKRMLASAGELQKGNELALPSKYVNFLYLASHYEKLKGSPEDNEQKQLFVEQHKHYLDEIIEQISEFSKRVILADANLDKVLSAYNKHRDKPIREQAENIIHLFTLTNLGAPAAFKYFDTTIDRKRYTSTKEVLDATLIHQSITGLYETRIDLSQLGGD

SEQ ID NO: 99 - protein, 1368 aa, Streptococcus pyogenes
  misc_feature (762)..(762): Xaa can be any naturally occurring amino acid
MDKKYSIGLDIGTNSVGWAVITDEYKVPSKKFKVLGNTDRHSIKKNLIGALLFDSGETAEATRLKRTARRRYTRRKNRICYLQEIFSNEMAKVDDSFFHRLEESFLVEEDKKHERHPIFGNIVDEVAYHEKYPTIYHLRKKLVDSTDKADLRLIYLALAHMIKFRGHFLIEGDLNPDNSDVDKLFIQLVQTYNQLFEENPINASGVDAKAILSARLSKSRRLENLIAQLPGEKKNGLFGNLIALSLGLTPNFKSNFDLAEDAKLQLSKDTYDDDLDNLLAQIGDQYADLFLAAKNLSDAILLSDILRVNTEITKAPLSASMIKRYDEHHQDLTLLKALVRQQLPEKYKEIFFDQSKNGYAGYIDGGASQEEFYKFIKPILEKMDGTEELLVKLNREDLLRKQRTFDNGSIPHQIHLGELHAILRRQEDFYPFLKDNREKIEKILTFRIPYYVGPLARGNSRFAWMTRKSEETITPWNFEEVVDKGASAQSFIERMTNFDKNLPNEKVLPKHSLLYEYFTVYNELTKVKYVTEGMRKPAFLSGEQKKAIVDLLFKTNRKVTVKQLKEDYFKKIECFDSVEISGVEDRFNASLGTYHDLLKIIKDKDFLDNEENEDILEDIVLTLTLFEDREMIEERLKTYAHLFDDKVMKQLKRRRYTGWGRLSRKLINGIRDKQSGKTILDFLKSDGFANRNFMQLIHDDSLTFKEDIQKAQVSGQGDSLHEHIANLAGSPAIKKGILQTVKVVDELVKVMGRHKPENIVIXMARENQTTQKGQKNSRERMKRIEEGIKELGSQILKEHPVENTQLQNEKLYLYYLQNGRDMYVDQELDINRLSDYDVDHIVPQSFLKDDSIDNKVLTRSDKNRGKSDNVPSEEVVKKMKNYWRQLLNAKLITQRKFDNLTKAERGGLSELDKAGFIKRQLVETRQITKHVAQILDSRMNTKYDENDKLIREVKVITLKSKLVSDFRKDFQFYKVREINNYHHAHDAYLNAVVGTALIKKYPKLESEFVYGDYKVYDVRKMIAKSEQEIGKATAKYFFYSNIMNFFKTEITLANGEIRKRPLIETNGETGEIVWDKGRDFATVRKVLSMPQVNIVKKTEVQTGGFSKESILPKRNSDKLIARKKDWDPKKYGGFDSPTVAYSVLVVAKVEKGKSKKLKSVKELLGITIMERSSFEKNPIDFLEAKGYKEVKKDLIIKLPKYSLFELENGRKRMLASAGELQKGNELALPSKYVNFLYLASHYEKLKGSPEDNEQKQLFVEQHKHYLDEIIEQISEFSKRVILADANLDKVLSAYNKHRDKPIREQAENIIHLFTLTNLGAPAAFKYFDTTIDRKRYTSTKEVLDATLIHQSITGLYETRIDLSQLGGD

SEQ ID NO: 100 - protein, 1368 aa, Streptococcus pyogenes
  misc_feature (10)..(10): Xaa can be any naturally occurring amino acid
  misc_feature (840)..(840): Xaa can be any naturally occurring amino acid
MDKKYSIGLXIGTNSVGWAVITDEYKVPSKKFKVLGNTDRHSIKKNLIGALLFDSGETAEATRLKRTARRRYTRRKNRICYLQEIFSNEMAKVDDSFFHRLEESFLVEEDKKHERHPIFGNIVDEVAYHEKYPTIYHLRKKLVDSTDKADLRLIYLALAHMIKFRGHFLIEGDLNPDNSDVDKLFIQLVQTYNQLFEENPINASGVDAKAILSARLSKSRRLENLIAQLPGEKKNGLFGNLIALSLGLTPNFKSNFDLAEDAKLQLSKDTYDDDLDNLLAQIGDQYADLFLAAKNLSDAILLSDILRVNTEITKAPLSASMIKRYDEHHQDLTLLKALVRQQLPEKYKEIFFDQSKNGYAGYIDGGASQEEFYKFIKPILEKMDGTEELLVKLNREDLLRKQRTFDNGSIPHQIHLGELHAILRRQEDFYPFLKDNREKIEKILTFRIPYYVGPLARGNSRFAWMTRKSEETITPWNFEEVVDKGASAQSFIERMTNFDKNLPNEKVLPKHSLLYEYFTVYNELTKVKYVTEGMRKPAFLSGEQKKAIVDLLFKTNRKVTVKQLKEDYFKKIECFDSVEISGVEDRFNASLGTYHDLLKIIKDKDFLDNEENEDILEDIVLTLTLFEDREMIEERLKTYAHLFDDKVMKQLKRRRYTGWGRLSRKLINGIRDKQSGKTILDFLKSDGFANRNFMQLIHDDSLTFKEDIQKAQVSGQGDSLHEHIANLAGSPAIKKGILQTVKVVDELVKVMGRHKPENIVIEMARENQTTQKGQKNSRERMKRIEEGIKELGSQILKEHPVENTQLQNEKLYLYYLQNGRDMYVDQELDINRLSDYDVDXIVPQSFLKDDSIDNKVLTRSDKNRGKSDNVPSEEVVKKMKNYWRQLLNAKLITQRKFDNLTKAERGGLSELDKAGFIKRQLVETRQITKHVAQILDSRMNTKYDENDKLIREVKVITLKSKLVSDFRKDFQFYKVREINNYHHAHDAYLNAVVGTALIKKYPKLESEFVYGDYKVYDVRKMIAKSEQEIGKATAKYFFYSNIMNFFKTEITLANGEIRKRPLIETNGETGEIVWDKGRDFATVRKVLSMPQVNIVKKTEVQTGGFSKESILPKRNSDKLIARKKDWDPKKYGGFDSPTVAYSVLVVAKVEKGKSKKLKSVKELLGITIMERSSFEKNPIDFLEAKGYKEVKKDLIIKLPKYSLFELENGRKRMLASAGELQKGNELALPSKYVNFLYLASHYEKLKGSPEDNEQKQLFVEQHKHYLDEIIEQISEFSKRVILADANLDKVLSAYNKHRDKPIREQAENIIHLFTLTNLGAPAAFKYFDTTIDRKRYTSTKEVLDATLIHQSITGLYETRIDLSQLGGD

SEQ ID NO: 101 - protein, 1368 aa, Streptococcus pyogenes
MDKKYSIGLAIGTNSVGWAVITDEYKVPSKKFKVLGNTDRHSIKKNLIGALLFDSGETAEATRLKRTARRRYTRRKNRICYLQEIFSNEMAKVDDSFFHRLEESFLVEEDKKHERHPIFGNIVDEVAYHEKYPTIYHLRKKLVDSTDKADLRLIYLALAHMIKFRGHFLIEGDLNPDNSDVDKLFIQLVQTYNQLFEENPINASGVDAKAILSARLSKSRRLENLIAQLPGEKKNGLFGNLIALSLGLTPNFKSNFDLAEDAKLQLSKDTYDDDLDNLLAQIGDQYADLFLAAKNLSDAILLSDILRVNTEITKAPLSASMIKRYDEHHQDLTLLKALVRQQLPEKYKEIFFDQSKNGYAGYIDGGASQEEFYKFIKPILEKMDGTEELLVKLNREDLLRKQRTFDNGSIPHQIHLGELHAILRRQEDFYPFLKDNREKIEKILTFRIPYYVGPLARGNSRFAWMTRKSEETITPWNFEEVVDKGASAQSFIERMTNFDKNLPNEKVLPKHSLLYEYFTVYNELTKVKYVTEGMRKPAFLSGEQKKAIVDLLFKTNRKVTVKQLKEDYFKKIECFDSVEISGVEDRFNASLGTYHDLLKIIKDKDFLDNEENEDILEDIVLTLTLFEDREMIEERLKTYAHLFDDKVMKQLKRRRYTGWGRLSRKLINGIRDKQSGKTILDFLKSDGFANRNFMQLIHDDSLTFKEDIQKAQVSGQGDSLHEHIANLAGSPAIKKGILQTVKVVDELVKVMGRHKPENIVIEMARENQTTQKGQKNSRERMKRIEEGIKELGSQILKEHPVENTQLQNEKLYLYYLQNGRDMYVDQELDINRLSDYDVDAIVPQSFLKDDSIDNKVLTRSDKNRGKSDNVPSEEVVKKMKNYWRQLLNAKLITQRKFDNLTKAERGGLSELDKAGFIKRQLVETRQITKHVAQILDSRMNTKYDENDKLIREVKVITLKSKLVSDFRKDFQFYKVREINNYHHAHDAYLNAVVGTALIKKYPKLESEFVYGDYKVYDVRKMIAKSEQEIGKATAKYFFYSNIMNFFKTEITLANGEIRKRPLIETNGETGEIVWDKGRDFATVRKVLSMPQVNIVKKTEVQTGGFSKESILPKRNSDKLIARKKDWDPKKYGGFDSPTVAYSVLVVAKVEKGKSKKLKSVKELLGITIMERSSFEKNPIDFLEAKGYKEVKKDLIIKLPKYSLFELENGRKRMLASAGELQKGNELALPSKYVNFLYLASHYEKLKGSPEDNEQKQLFVEQHKHYLDEIIEQISEFSKRVILADANLDKVLSAYNKHRDKPIREQAENIIHLFTLTNLGAPAAFKYFDTTIDRKRYTSTKEVLDATLIHQSITGLYETRIDLSQLGGD

SEQ ID NO: 102 - protein, 1368 aa, Streptococcus pyogenes
MDKKYSIGLAIGTNSVGWAVITDEYKVPSKKFKVLGNTDRHSIKKNLIGALLFDSGETAEATRLKRTARRRYTRRKNRICYLQEIFSNEMAKVDDSFFHRLEESFLVEEDKKHERHPIFGNIVDEVAYHEKYPTIYHLRKKLVDSTDKADLRLIYLALAHMIKFRGHFLIEGDLNPDNSDVDKLFIQLVQTYNQLFEENPINASGVDAKAILSARLSKSRRLENLIAQLPGEKKNGLFGNLIALSLGLTPNFKSNFDLAEDAKLQLSKDTYDDDLDNLLAQIGDQYADLFLAAKNLSDAILLSDILRVNTEITKAPLSASMIKRYDEHHQDLTLLKALVRQQLPEKYKEIFFDQSKNGYAGYIDGGASQEEFYKFIKPILEKMDGTEELLVKLNREDLLRKQRTFDNGSIPHQIHLGELHAILRRQEDFYPFLKDNREKIEKILTFRIPYYVGPLARGNSRFAWMTRKSEETITPWNFEEVVDKGASAQSFIERMTNFDKNLPNEKVLPKHSLLYEYFTVYNELTKVKYVTEGMRKPAFLSGEQKKAIVDLLFKTNRKVTVKQLKEDYFKKIECFDSVEISGVEDRFNASLGTYHDLLKIIKDKDFLDNEENEDILEDIVLTLTLFEDREMIEERLKTYAHLFDDKVMKQLKRRRYTGWGRLSRKLINGIRDKQSGKTILDFLKSDGFANRNFMQLIHDDSLTFKEDIQKAQVSGQGDSLHEHIANLAGSPAIKKGILQTVKVVDELVKVMGRHKPENIVIEMARENQTTQKGQKNSRERMKRIEEGIKELGSQILKEHPVENTQLQNEKLYLYYLQNGRDMYVDQELDINRLSDYDVDHIVPQSFLKDDSIDNKVLTRSDKNRGKSDNVPSEEVVKKMKNYWRQLLNAKLITQRKFDNLTKAERGGLSELDKAGFIKRQLVETRQITKHVAQILDSRMNTKYDENDKLIREVKVITLKSKLVSDFRKDFQFYKVREINNYHHAHDAYLNAVVGTALIKKYPKLESEFVYGDYKVYDVRKMIAKSEQEIGKATAKYFFYSNIMNFFKTEITLANGEIRKRPLIETNGETGEIVWDKGRDFATVRKVLSMPQVNIVKKTEVQTGGFSKESILPKRNSDKLIARKKDWDPKKYGGFDSPTVAYSVLVVAKVEKGKSKKLKSVKELLGITIMERSSFEKNPIDFLEAKGYKEVKKDLIIKLPKYSLFELENGRKRMLASAGELQKGNELALPSKYVNFLYLASHYEKLKGSPEDNEQKQLFVEQHKHYLDEIIEQISEFSKRVILADANLDKVLSAYNKHRDKPIREQAENIIHLFTLTNLGAPAAFKYFDTTIDRKRYTSTKEVLDATLIHQSITGLYETRIDLSQLGGD

SEQ ID NO: 103 - protein, 1368 aa, Streptococcus pyogenes
MDKKYSIGLDIGTNSVGWAVITDEYKVPSKKFKVLGNTDRHSIKKNLIGALLFDSGETAEATRLKRTARRRYTRRKNRICYLQEIFSNEMAKVDDSFFHRLEESFLVEEDKKHERHPIFGNIVDEVAYHEKYPTIYHLRKKLVDSTDKADLRLIYLALAHMIKFRGHFLIEGDLNPDNSDVDKLFIQLVQTYNQLFEENPINASGVDAKAILSARLSKSRRLENLIAQLPGEKKNGLFGNLIALSLGLTPNFKSNFDLAEDAKLQLSKDTYDDDLDNLLAQIGDQYADLFLAAKNLSDAILLSDILRVNTEITKAPLSASMIKRYDEHHQDLTLLKALVRQQLPEKYKEIFFDQSKNGYAGYIDGGASQEEFYKFIKPILEKMDGTEELLVKLNREDLLRKQRTFDNGSIPHQIHLGELHAILRRQEDFYPFLKDNREKIEKILTFRIPYYVGPLARGNSRFAWMTRKSEETITPWNFEEVVDKGASAQSFIERMTNFDKNLPNEKVLPKHSLLYEYFTVYNELTKVKYVTEGMRKPAFLSGEQKKAIVDLLFKTNRKVTVKQLKEDYFKKIECFDSVEISGVEDRFNASLGTYHDLLKIIKDKDFLDNEENEDILEDIVLTLTLFEDREMIEERLKTYAHLFDDKVMKQLKRRRYTGWGRLSRKLINGIRDKQSGKTILDFLKSDGFANRNFMQLIHDDSLTFKEDIQKAQVSGQGDSLHEHIANLAGSPAIKKGILQTVKVVDELVKVMGRHKPENIVIAMARENQTTQKGQKNSRERMKRIEEGIKELGSQILKEHPVENTQLQNEKLYLYYLQNGRDMYVDQELDINRLSDYDVDHIVPQSFLKDDSIDNKVLTRSDKNRGKSDNVPSEEVVKKMKNYWRQLLNAKLITQRKFDNLTKAERGGLSELDKAGFIKRQLVETRQITKHVAQILDSRMNTKYDENDKLIREVKVITLKSKLVSDFRKDFQFYKVREINNYHHAHDAYLNAVVGTALIKKYPKLESEFVYGDYKVYDVRKMIAKSEQEIGKATAKYFFYSNIMNFFKTEITLANGEIRKRPLIETNGETGEIVWDKGRDFATVRKVLSMPQVNIVKKTEVQTGGFSKESILPKRNSDKLIARKKDWDPKKYGGFDSPTVAYSVLVVAKVEKGKSKKLKSVKELLGITIMERSSFEKNPIDFLEAKGYKEVKKDLIIKLPKYSLFELENGRKRMLASAGELQKGNELALPSKYVNFLYLASHYEKLKGSPEDNEQKQLFVEQHKHYLDEIIEQISEFSKRVILADANLDKVLSAYNKHRDKPIREQAENIIHLFTLTNLGAPAAFKYFDTTIDRKRYTSTKEVLDATLIHQSITGLYETRIDLSQLGGD

SEQ ID NO: 104 - protein, 1368 aa, Streptococcus pyogenes
MDKKYSIGLDIGTNSVGWAVITDEYKVPSKKFKVLGNTDRHSIKKNLIGALLFDSGETAEATRLKRTARRRYTRRKNRICYLQEIFSNEMAKVDDSFFHRLEESFLVEEDKKHERHPIFGNIVDEVAYHEKYPTIYHLRKKLVDSTDKADLRLIYLALAHMIKFRGHFLIEGDLNPDNSDVDKLFIQLVQTYNQLFEENPINASGVDAKAILSARLSKSRRLENLIAQLPGEKKNGLFGNLIALSLGLTPNFKSNFDLAEDAKLQLSKDTYDDDLDNLLAQIGDQYADLFLAAKNLSDAILLSDILRVNTEITKAPLSASMIKRYDEHHQDLTLLKALVRQQLPEKYKEIFFDQSKNGYAGYIDGGASQEEFYKFIKPILEKMDGTEELLVKLNREDLLRKQRTFDNGSIPHQIHLGELHAILRRQEDFYPFLKDNREKIEKILTFRIPYYVGPLARGNSRFAWMTRKSEETITPWNFEEVVDKGASAQSFIERMTNFDKNLPNEKVLPKHSLLYEYFTVYNELTKVKYVTEGMRKPAFLSGEQKKAIVDLLFKTNRKVTVKQLKEDYFKKIECFDSVEISGVEDRFNASLGTYHDLLKIIKDKDFLDNEENEDILEDIVLTLTLFEDREMIEERLKTYAHLFDDKVMKQLKRRRYTGWGRLSRKLINGIRDKQSGKTILDFLKSDGFANRNFMQLIHDDSLTFKEDIQKAQVSGQGDSLHEHIANLAGSPAIKKGILQTVKVVDELVKVMGRHKPENIVIEMARENQTTQKGQKNSRERMKRIEEGIKELGSQILKEHPVENTQLQNEKLYLYYLQNGRDMYVDQELDINRLSDYDVDHIVPQSFLKDDSIDNKVLTRSDKNRGKSDNVPSEEVVKKMKNYWRQLLNAKLITQRKFDNLTKAERGGLSELDKAGFIKRQLVETRQITKHVAQILDSRMNTKYDENDKLIREVKVITLKSKLVSDFRKDFQFYKVREINNYHAAHDAYLNAVVGTALIKKYPKLESEFVYGDYKVYDVRKMIAKSEQEIGKATAKYFFYSNIMNFFKTEITLANGEIRKRPLIETNGETGEIVWDKGRDFATVRKVLSMPQVNIVKKTEVQTGGFSKESILPKRNSDKLIARKKDWDPKKYGGFDSPTVAYSVLVVAKVEKGKSKKLKSVKELLGITIMERSSFEKNPIDFLEAKGYKEVKKDLIIKLPKYSLFELENGRKRMLASAGELQKGNELALPSKYVNFLYLASHYEKLKGSPEDNEQKQLFVEQHKHYLDEIIEQISEFSKRVILADANLDKVLSAYNKHRDKPIREQAENIIHLFTLTNLGAPAAFKYFDTTIDRKRYTSTKEVLDATLIHQSITGLYETRIDLSQLGGD

SEQ ID NO: 105 - protein, 1368 aa, Streptococcus pyogenes
MDKKYSIGLDIGTNSVGWAVITDEYKVPSKKFKVLGNTDRHSIKKNLIGALLFDSGETAEATRLKRTARRRYTRRKNRICYLQEIFSNEMAKVDDSFFHRLEESFLVEEDKKHERHPIFGNIVDEVAYHEKYPTIYHLRKKLVDSTDKADLRLIYLALAHMIKFRGHFLIEGDLNPDNSDVDKLFIQLVQTYNQLFEENPINASGVDAKAILSARLSKSRRLENLIAQLPGEKKNGLFGNLIALSLGLTPNFKSNFDLAEDAKLQLSKDTYDDDLDNLLAQIGDQYADLFLAAKNLSDAILLSDILRVNTEITKAPLSASMIKRYDEHHQDLTLLKALVRQQLPEKYKEIFFDQSKNGYAGYIDGGASQEEFYKFIKPILEKMDGTEELLVKLNREDLLRKQRTFDNGSIPHQIHLGELHAILRRQEDFYPFLKDNREKIEKILTFRIPYYVGPLARGNSRFAWMTRKSEETITPWNFEEVVDKGASAQSFIERMTNFDKNLPNEKVLPKHSLLYEYFTVYNELTKVKYVTEGMRKPAFLSGEQKKAIVDLLFKTNRKVTVKQLKEDYFKKIECFDSVEISGVEDRFNASLGTYHDLLKIIKDKDFLDNEENEDILEDIVLTLTLFEDREMIEERLKTYAHLFDDKVMKQLKRRRYTGWGRLSRKLINGIRDKQSGKTILDFLKSDGFANRNFMQLIHDDSLTFKEDIQKAQVSGQGDSLHEHIANLAGSPAIKKGILQTVKVVDELVKVMGRHKPENIVIEMARENQTTQKGQKNSRERMKRIEEGIKELGSQILKEHPVENTQLQNEKLYLYYLQNGRDMYVDQELDINRLSDYDVDHIVPQSFLKDDSIDNKVLTRSDKNRGKSDNVPSEEVVKKMKNYWRQLLNAKLITQRKFDNLTKAERGGLSELDKAGFIKRQLVETRQITKHVAQILDSRMNTKYDENDKLIREVKVITLKSKLVSDFRKDFQFYKVREINNYHHAHAAYLNAVVGTALIKKYPKLESEFVYGDYKVYDVRKMIAKSEQEIGKATAKYFFYSNIMNFFKTEITLANGEIRKRPLIETNGETGEIVWDKGRDFATVRKVLSMPQVNIVKKTEVQTGGFSKESILPKRNSDKLIARKKDWDPKKYGGFDSPTVAYSVLVVAKVEKGKSKKLKSVKELLGITIMERSSFEKNPIDFLEAKGYKEVKKDLIIKLPKYSLFELENGRKRMLASAGELQKGNELALPSKYVNFLYLASHYEKLKGSPEDNEQKQLFVEQHKHYLDEIIEQISEFSKRVILADANLDKVLSAYNKHRDKPIREQAENIIHLFTLTNLGAPAAFKYFDTTIDRKRYTSTKEVLDATLIHQSITGLYETRIDLSQLGGD

SEQ ID NO: 106 - protein, 1368 aa, Streptococcus pyogenes
  misc_feature (840)..(840): Xaa can be any naturally occurring amino acid
MDKKYSIGLDIGTNSVGWAVITDEYKVPSKKFKVLGNTDRHSIKKNLIGALLFDSGETAEATRLKRTARRRYTRRKNRICYLQEIFSNEMAKVDDSFFHRLEESFLVEEDKKHERHPIFGNIVDEVAYHEKYPTIYHLRKKLVDSTDKADLRLIYLALAHMIKFRGHFLIEGDLNPDNSDVDKLFIQLVQTYNQLFEENPINASGVDAKAILSARLSKSRRLENLIAQLPGEKKNGLFGNLIALSLGLTPNFKSNFDLAEDAKLQLSKDTYDDDLDNLLAQIGDQYADLFLAAKNLSDAILLSDILRVNTEITKAPLSASMIKRYDEHHQDLTLLKALVRQQLPEKYKEIFFDQSKNGYAGYIDGGASQEEFYKFIKPILEKMDGTEELLVKLNREDLLRKQRTFDNGSIPHQIHLGELHAILRRQEDFYPFLKDNREKIEKILTFRIPYYVGPLARGNSRFAWMTRKSEETITPWNFEEVVDKGASAQSFIERMTNFDKNLPNEKVLPKHSLLYEYFTVYNELTKVKYVTEGMRKPAFLSGEQKKAIVDLLFKTNRKVTVKQLKEDYFKKIECFDSVEISGVEDRFNASLGTYHDLLKIIKDKDFLDNEENEDILEDIVLTLTLFEDREMIEERLKTYAHLFDDKVMKQLKRRRYTGWGRLSRKLINGIRDKQSGKTILDFLKSDGFANRNFMQLIHDDSLTFKEDIQKAQVSGQGDSLHEHIANLAGSPAIKKGILQTVKVVDELVKVMGRHKPENIVIEMARENQTTQKGQKNSRERMKRIEEGIKELGSQILKEHPVENTQLQNEKLYLYYLQNGRDMYVDQELDINRLSDYDVDXIVPQSFLKDDSIDNKVLTRSDKNRGKSDNVPSEEVVKKMKNYWRQLLNAKLITQRKFDNLTKAERGGLSELDKAGFIKRQLVETRQITKHVAQILDSRMNTKYDENDKLIREVKVITLKSKLVSDFRKDFQFYKVREINNYHHAHDAYLNAVVGTALIKKYPKLESEFVYGDYKVYDVRKMIAKSEQEIGKATAKYFFYSNIMNFFKTEITLANGEIRKRPLIETNGETGEIVWDKGRDFATVRKVLSMPQVNIVKKTEVQTGGFSKESILPKRNSDKLIARKKDWDPKKYGGFDSPTVAYSVLVVAKVEKGKSKKLKSVKELLGITIMERSSFEKNPIDFLEAKGYKEVKKDLIIKLPKYSLFELENGRKRMLASAGELQKGNELALPSKYVNFLYLASHYEKLKGSPEDNEQKQLFVEQHKHYLDEIIEQISEFSKRVILADANLDKVLSAYNKHRDKPIREQAENIIHLFTLTNLGAPAAFKYFDTTIDRKRYTSTKEVLDATLIHQSITGLYETRIDLSQLGGD

SEQ ID NO: 107 - protein, 1368 aa, Streptococcus pyogenes
MDKKYSIGLDIGTNSVGWAVITDEYKVPSKKFKVLGNTDRHSIKKNLIGALLFDSGETAEATRLKRTARRRYTRRKNRICYLQEIFSNEMAKVDDSFFHRLEESFLVEEDKKHERHPIFGNIVDEVAYHEKYPTIYHLRKKLVDSTDKADLRLIYLALAHMIKFRGHFLIEGDLNPDNSDVDKLFIQLVQTYNQLFEENPINASGVDAKAILSARLSKSRRLENLIAQLPGEKKNGLFGNLIALSLGLTPNFKSNFDLAEDAKLQLSKDTYDDDLDNLLAQIGDQYADLFLAAKNLSDAILLSDILRVNTEITKAPLSASMIKRYDEHHQDLTLLKALVRQQLPEKYKEIFFDQSKNGYAGYIDGGASQEEFYKFIKPILEKMDGTEELLVKLNREDLLRKQRTFDNGSIPHQIHLGELHAILRRQEDFYPFLKDNREKIEKILTFRIPYYVGPLARGNSRFAWMTRKSEETITPWNFEEVVDKGASAQSFIERMTNFDKNLPNEKVLPKHSLLYEYFTVYNELTKVKYVTEGMRKPAFLSGEQKKAIVDLLFKTNRKVTVKQLKEDYFKKIECFDSVEISGVEDRFNASLGTYHDLLKIIKDKDFLDNEENEDILEDIVLTLTLFEDREMIEERLKTYAHLFDDKVMKQLKRRRYTGWGRLSRKLINGIRDKQSGKTILDFLKSDGFANRNFMQLIHDDSLTFKEDIQKAQVSGQGDSLHEHIANLAGSPAIKKGILQTVKVVDELVKVMGRHKPENIVIEMARENQTTQKGQKNSRERMKRIEEGIKELGSQILKEHPVENTQLQNEKLYLYYLQNGRDMYVDQELDINRLSDYDVDAIVPQSFLKDDSIDNKVLTRSDKNRGKSDNVPSEEVVKKMKNYWRQLLNAKLITQRKFDNLTKAERGGLSELDKAGFIKRQLVETRQITKHVAQILDSRMNTKYDENDKLIREVKVITLKSKLVSDFRKDFQFYKVREINNYHHAHDAYLNAVVGTALIKKYPKLESEFVYGDYKVYDVRKMIAKSEQEIGKATAKYFFYSNIMNFFKTEITLANGEIRKRPLIETNGETGEIVWDKGRDFATVRKVLSMPQVNIVKKTEVQTGGFSKESILPKRNSDKLIARKKDWDPKKYGGFDSPTVAYSVLVVAKVEKGKSKKLKSVKELLGITIMERSSFEKNPIDFLEAKGYKEVKKDLIIKLPKYSLFELENGRKRMLASAGELQKGNELALPSKYVNFLYLASHYEKLKGSPEDNEQKQLFVEQHKHYLDEIIEQISEFSKRVILADANLDKVLSAYNKHRDKPIREQAENIIHLFTLTNLGAPAAFKYFDTTIDRKRYTSTKEVLDATLIHQSITGLYETRIDLSQLGGD

SEQ ID NO: 108 - protein, 1368 aa, Streptococcus pyogenes
  misc_feature (864)..(864): Xaa can be any naturally occurring amino acid
MDKKYSIGLDIGTNSVGWAVITDEYKVPSKKFKVLGNTDRHSIKKNLIGALLFDSGETAEATRLKRTARRRYTRRKNRICYLQEIFSNEMAKVDDSFFHRLEESFLVEEDKKHERHPIFGNIVDEVAYHEKYPTIYHLRKKLVDSTDKADLRLIYLALAHMIKFRGHFLIEGDLNPDNSDVDKLFIQLVQTYNQLFEENPINASGVDAKAILSARLSKSRRLENLIAQLPGEKKNGLFGNLIALSLGLTPNFKSNFDLAEDAKLQLSKDTYDDDLDNLLAQIGDQYADLFLAAKNLSDAILLSDILRVNTEITKAPLSASMIKRYDEHHQDLTLLKALVRQQLPEKYKEIFFDQSKNGYAGYIDGGASQEEFYKFIKPILEKMDGTEELLVKLNREDLLRKQRTFDNGSIPHQIHLGELHAILRRQEDFYPFLKDNREKIEKILTFRIPYYVGPLARGNSRFAWMTRKSEETITPWNFEEVVDKGASAQSFIERMTNFDKNLPNEKVLPKHSLLYEYFTVYNELTKVKYVTEGMRKPAFLSGEQKKAIVDLLFKTNRKVTVKQLKEDYFKKIECFDSVEISGVEDRFNASLGTYHDLLKIIKDKDFLDNEENEDILEDIVLTLTLFEDREMIEERLKTYAHLFDDKVMKQLKRRRYTGWGRLSRKLINGIRDKQSGKTILDFLKSDGFANRNFMQLIHDDSLTFKEDIQKAQVSGQGDSLHEHIANLAGSPAIKKGILQTVKVVDELVKVMGRHKPENIVIEMARENQTTQKGQKNSRERMKRIEEGIKELGSQILKEHPVENTQLQNEKLYLYYLQNGRDMYVDQELDINRLSDYDVDHIVPQSFLKDDSIDNKVLTRSDKNXGKSDNVPSEEVVKKMKNYWRQLLNAKLITQRKFDNLTKAERGGLSELDKAGFIKRQLVETRQITKHVAQILDSRMNTKYDENDKLIREVKVITLKSKLVSDFRKDFQFYKVREINNYHHAHDAYLNAVVGTALIKKYPKLESEFVYGDYKVYDVRKMIAKSEQEIGKATAKYFFYSNIMNFFKTEITLANGEIRKRPLIETNGETGEIVWDKGRDFATVRKVLSMPQVNIVKKTEVQTGGFSKESILPKRNSDKLIARKKDWDPKKYGGFDSPTVAYSVLVVAKVEKGKSKKLKSVKELLGITIMERSSFEKNPIDFLEAKGYKEVKKDLIIKLPKYSLFELENGRKRMLASAGELQKGNELALPSKYVNFLYLASHYEKLKGSPEDNEQKQLFVEQHKHYLDEIIEQISEFSKRVILADANLDKVLSAYNKHRDKPIREQAENIIHLFTLTNLGAPAAFKYFDTTIDRKRYTSTKEVLDATLIHQSITGLYETRIDLSQLGGD

SEQ ID NO: 109 - protein, 1368 aa, Streptococcus pyogenes
MDKKYSIGLDIGTNSVGWAVITDEYKVPSKKFKVLGNTDRHSIKKNLIGALLFDSGETAEATRLKRTARRRYTRRKNRICYLQEIFSNEMAKVDDSFFHRLEESFLVEEDKKHERHPIFGNIVDEVAYHEKYPTIYHLRKKLVDSTDKADLRLIYLALAHMIKFRGHFLIEGDLNPDNSDVDKLFIQLVQTYNQLFEENPINASGVDAKAILSARLSKSRRLENLIAQLPGEKKNGLFGNLIALSLGLTPNFKSNFDLAEDAKLQLSKDTYDDDLDNLLAQIGDQYADLFLAAKNLSDAILLSDILRVNTEITKAPLSASMIKRYDEHHQDLTLLKALVRQQLPEKYKEIFFDQSKNGYAGYIDGGASQEEFYKFIKPILEKMDGTEELLVKLNREDLLRKQRTFDNGSIPHQIHLGELHAILRRQEDFYPFLKDNREKIEKILTFRIPYYVGPLARGNSRFAWMTRKSEETITPWNFEEVVDKGASAQSFIERMTNFDKNLPNEKVLPKHSLLYEYFTVYNELTKVKYVTEGMRKPAFLSGEQKKAIVDLLFKTNRKVTVKQLKEDYFKKIECFDSVEISGVEDRFNASLGTYHDLLKIIKDKDFLDNEENEDILEDIVLTLTLFEDREMIEERLKTYAHLFDDKVMKQLKRRRYTGWGRLSRKLINGIRDKQSGKTILDFLKSDGFANRNFMQLIHDDSLTFKEDIQKAQVSGQGDSLHEHIANLAGSPAIKKGILQTVKVVDELVKVMGRHKPENIVIEMARENQTTQKGQKNSRERMKRIEEGIKELGSQILKEHPVENTQLQNEKLYLYYLQNGRDMYVDQELDINRLSDYDVDHIVPQSFLKDDSIDNKVLTRSDKNAGKSDNVPSEEVVKKMKNYWRQLLNAKLITQRKFDNLTKAERGGLSELDKAGFIKRQLVETRQITKHVAQILDSRMNTKYDENDKLIREVKVITLKSKLVSDFRKDFQFYKVREINNYHHAHDAYLNAVVGTALIKKYPKLESEFVYGDYKVYDVRKMIAKSEQEIGKATAKYFFYSNIMNFFKTEITLANGEIRKRPLIETNGETGEIVWDKGRDFATVRKVLSMPQVNIVKKTEVQTGGFSKESILPKRNSDKLIARKKDWDPKKYGGFDSPTVAYSVLVVAKVEKGKSKKLKSVKELLGITIMERSSFEKNPIDFLEAKGYKEVKKDLIIKLPKYSLFELENGRKRMLASAGELQKGNELALPSKYVNFLYLASHYEKLKGSPEDNEQKQLFVEQHKHYLDEIIEQISEFSKRVILADANLDKVLSAYNKHRDKPIREQAENIIHLFTLTNLGAPAAFKYFDTTIDRKRYTSTKEVLDATLIHQSITGLYETRIDLSQLGGD

SEQ ID NO: 110 - protein, 1367 aa, Streptococcus pyogenes
  misc_feature (839)..(839): Xaa can be any naturally occurring amino acid
DKKYSIGLDIGTNSVGWAVITDEYKVPSKKFKVLGNTDRHSIKKNLIGALLFDSGETAEATRLKRTARRRYTRRKNRICYLQEIFSNEMAKVDDSFFHRLEESFLVEEDKKHERHPIFGNIVDEVAYHEKYPTIYHLRKKLVDSTDKADLRLIYLALAHMIKFRGHFLIEGDLNPDNSDVDKLFIQLVQTYNQLFEENPINASGVDAKAILSARLSKSRRLENLIAQLPGEKKNGLFGNLIALSLGLTPNFKSNFDLAEDAKLQLSKDTYDDDLDNLLAQIGDQYADLFLAAKNLSDAILLSDILRVNTEITKAPLSASMIKRYDEHHQDLTLLKALVRQQLPEKYKEIFFDQSKNGYAGYIDGGASQEEFYKFIKPILEKMDGTEELLVKLNREDLLRKQRTFDNGSIPHQIHLGELHAILRRQEDFYPFLKDNREKIEKILTFRIPYYVGPLARGNSRFAWMTRKSEETITPWNFEEVVDKGASAQSFIERMTNFDKNLPNEKVLPKHSLLYEYFTVYNELTKVKYVTEGMRKPAFLSGEQKKAIVDLLFKTNRKVTVKQLKEDYFKKIECFDSVEISGVEDRFNASLGTYHDLLKIIKDKDFLDNEENEDILEDIVLTLTLFEDREMIEERLKTYAHLFDDKVMKQLKRRRYTGWGRLSRKLINGIRDKQSGKTILDFLKSDGFANRNFMQLIHDDSLTFKEDIQKAQVSGQGDSLHEHIANLAGSPAIKKGILQTVKVVDELVKVMGRHKPENIVIEMARENQTTQKGQKNSRERMKRIEEGIKELGSQILKEHPVENTQLQNEKLYLYYLQNGRDMYVDQELDINRLSDYDVDXIVPQSFLKDDSIDNKVLTRSDKNRGKSDNVPSEEVVKKMKNYWRQLLNAKLITQRKFDNLTKAERGGLSELDKAGFIKRQLVETRQITKHVAQILDSRMNTKYDENDKLIREVKVITLKSKLVSDFRKDFQFYKVREINNYHHAHDAYLNAVVGTALIKKYPKLESEFVYGDYKVYDVRKMIAKSEQEIGKATAKYFFYSNIMNFFKTEITLANGEIRKRPLIETNGETGEIVWDKGRDFATVRKVLSMPQVNIVKKTEVQTGGFSKESILPKRNSDKLIARKKDWDPKKYGGFDSPTVAYSVLVVAKVEKGKSKKLKSVKELLGITIMERSSFEKNPIDFLEAKGYKEVKKDLIIKLPKYSLFELENGRKRMLASAGELQKGNELALPSKYVNFLYLASHYEKLKGSPEDNEQKQLFVEQHKHYLDEIIEQISEFSKRVILADANLDKVLSAYNKHRDKPIREQAENIIHLFTLTNLGAPAAFKYFDTTIDRKRYTSTKEVLDATLIHQSITGLYETRIDLSQLGGD

SEQ ID NO: 111 - protein, 1367 aa, Streptococcus pyogenes
DKKYSIGLDIGTNSVGWAVITDEYKVPSKKFKVLGNTDRHSIKKNLIGALLFDSGETAEATRLKRTARRRYTRRKNRICYLQEIFSNEMAKVDDSFFHRLEESFLVEEDKKHERHPIFGNIVDEVAYHEKYPTIYHLRKKLVDSTDKADLRLIYLALAHMIKFRGHFLIEGDLNPDNSDVDKLFIQLVQTYNQLFEENPINASGVDAKAILSARLSKSRRLENLIAQLPGEKKNGLFGNLIALSLGLTPNFKSNFDLAEDAKLQLSKDTYDDDLDNLLAQIGDQYADLFLAAKNLSDAILLSDILRVNTEITKAPLSASMIKRYDEHHQDLTLLKALVRQQLPEKYKEIFFDQSKNGYAGYIDGGASQEEFYKFIKPILEKMDGTEELLVKLNREDLLRKQRTFDNGSIPHQIHLGELHAILRRQEDFYPFLKDNREKIEKILTFRIPYYVGPLARGNSRFAWMTRKSEETITPWNFEEVVDKGASAQSFIERMTNFDKNLPNEKVLPKHSLLYEYFTVYNELTKVKYVTEGMRKPAFLSGEQKKAIVDLLFKTNRKVTVKQLKEDYFKKIECFDSVEISGVEDRFNASLGTYHDLLKIIKDKDFLDNEENEDILEDIVLTLTLFEDREMIEERLKTYAHLFDDKVMKQLKRRRYTGWGRLSRKLINGIRDKQSGKTILDFLKSDGFANRNFMQLIHDDSLTFKEDIQKAQVSGQGDSLHEHIANLAGSPAIKKGILQTVKVVDELVKVMGRHKPENIVIEMARENQTTQKGQKNSRERMKRIEEGIKELGSQILKEHPVENTQLQNEKLYLYYLQNGRDMYVDQELDINRLSDYDVDAIVPQSFLKDDSIDNKVLTRSDKNRGKSDNVPSEEVVKKMKNYWRQLLNAKLITQRKFDNLTKAERGGLSELDKAGFIKRQLVETRQITKHVAQILDSRMNTKYDENDKLIREVKVITLKSKLVSDFRKDFQFYKVREINNYHHAHDAYLNAVVGTALIKKYPKLESEFVYGDYKVYDVRKMIAKSEQEIGKATAKYFFYSNIMNFFKTEITLANGEIRKRPLIETNGETGEIVWDKGRDFATVRKVLSMPQVNIVKKTEVQTGGFSKESILPKRNSDKLIARKKDWDPKKYGGFDSPTVAYSVLVVAKVEKGKSKKLKSVKELLGITIMERSSFEKNPIDFLEAKGYKEVKKDLIIKLPKYSLFELENGRKRMLASAGELQKGNELALPSKYVNFLYLASHYEKLKGSPEDNEQKQLFVEQHKHYLDEIIEQISEFSKRVILADANLDKVLSAYNKHRDKPIREQAENIIHLFTLTNLGAPAAFKYFDTTIDRKRYTSTKEVLDATLIHQSITGLYETRIDLSQLGGD

SEQ ID NO: 112 - protein, 1367 aa, Streptococcus pyogenes
  misc_feature (863)..(863): Xaa can be any naturally occurring amino acid
DKKYSIGLDIGTNSVGWAVITDEYKVPSKKFKVLGNTDRHSIKKNLIGALLFDSGETAEATRLKRTARRRYTRRKNRICYLQEIFSNEMAKVDDSFFHRLEESFLVEEDKKHERHPIFGNIVDEVAYHEKYPTIYHLRKKLVDSTDKADLRLIYLALAHMIKFRGHFLIEGDLNPDNSDVDKLFIQLVQTYNQLFEENPINASGVDAKAILSARLSKSRRLENLIAQLPGEKKNGLFGNLIALSLGLTPNFKSNFDLAEDAKLQLSKDTYDDDLDNLLAQIGDQYADLFLAAKNLSDAILLSDILRVNTEITKAPLSASMIKRYDEHHQDLTLLKALVRQQLPEKYKEIFFDQSKNGYAGYIDGGASQEEFYKFIKPILEKMDGTEELLVKLNREDLLRKQRTFDNGSIPHQIHLGELHAILRRQEDFYPFLKDNREKIEKILTFRIPYYVGPLARGNSRFAWMTRKSEETITPWNFEEVVDKGASAQSFIERMTNFDKNLPNEKVLPKHSLLYEYFTVYNELTKVKYVTEGMRKPAFLSGEQKKAIVDLLFKTNRKVTVKQLKEDYFKKIECFDSVEISGVEDRFNASLGTYHDLLKIIKDKDFLDNEENEDILEDIVLTLTLFEDREMIEERLKTYAHLFDDKVMKQLKRRRYTGWGRLSRKLINGIRDKQSGKTILDFLKSDGFANRNFMQLIHDDSLTFKEDIQKAQVSGQGDSLHEHIANLAGSPAIKKGILQTVKVVDELVKVMGRHKPENIVIEMARENQTTQKGQKNSRERMKRIEEGIKELGSQILKEHPVENTQLQNEKLYLYYLQNGRDMYVDQELDINRLSDYDVDHIVPQSFLKDDSIDNKVLTRSDKNXGKSDNVPSEEVVKKMKNYWRQLLNAKLITQRKFDNLTKAERGGLSELDKAGFIKRQLVETRQITKHVAQILDSRMNTKYDENDKLIREVKVITLKSKLVSDFRKDFQFYKVREINNYHHAHDAYLNAVVGTALIKKYPKLESEFVYGDYKVYDVRKMIAKSEQEIGKATAKYFFYSNIMNFFKTEITLANGEIRKRPLIETNGETGEIVWDKGRDFATVRKVLSMPQVNIVKKTEVQTGGFSKESILPKRNSDKLIARKKDWDPKKYGGFDSPTVAYSVLVVAKVEKGKSKKLKSVKELLGITIMERSSFEKNPIDFLEAKGYKEVKKDLIIKLPKYSLFELENGRKRMLASAGELQKGNELALPSKYVNFLYLASHYEKLKGSPEDNEQKQLFVEQHKHYLDEIIEQISEFSKRVILADANLDKVLSAYNKHRDKPIREQAENIIHLFTLTNLGAPAAFKYFDTTIDRKRYTSTKEVLDATLIHQSITGLYETRIDLSQLGGD

SEQ ID NO: 113 - protein, 1367 aa, Streptococcus pyogenes
DKKYSIGLDIGTNSVGWAVITDEYKVPSKKFKVLGNTDRHSIKKNLIGALLFDSGETAEATRLKRTARRRYTRRKNRICYLQEIFSNEMAKVDDSFFHRLEESFLVEEDKKHERHPIFGNIVDEVAYHEKYPTIYHLRKKLVDSTDKADLRLIYLALAHMIKFRGHFLIEGDLNPDNSDVDKLFIQLVQTYNQLFEENPINASGVDAKAILSARLSKSRRLENLIAQLPGEKKNGLFGNLIALSLGLTPNFKSNFDLAEDAKLQLSKDTYDDDLDNLLAQIGDQYADLFLAAKNLSDAILLSDILRVNTEITKAPLSASMIKRYDEHHQDLTLLKALVRQQLPEKYKEIFFDQSKNGYAGYIDGGASQEEFYKFIKPILEKMDGTEELLVKLNREDLLRKQRTFDNGSIPHQIHLGELHAILRRQEDFYPFLKDNREKIEKILTFRIPYYVGPLARGNSRFAWMTRKSEETITPWNFEEVVDKGASAQSFIERMTNFDKNLPNEKVLPKHSLLYEYFTVYNELTKVKYVTEGMRKPAFLSGEQKKAIVDLLFKTNRKVTVKQLKEDYFKKIECFDSVEISGVEDRFNASLGTYHDLLKIIKDKDFLDNEENEDILEDIVLTLTLFEDREMIEERLKTYAHLFDDKVMKQLKRRRYTGWGRLSRKLINGIRDKQSGKTILDFLKSDGFANRNFMQLIHDDSLTFKEDIQKAQVSGQGDSLHEHIANLAGSPAIKKGILQTVKVVDELVKVMGRHKPENIVIEMARENQTTQKGQKNSRERMKRIEEGIKELGSQILKEHPVENTQLQNEKLYLYYLQNGRDMYVDQELDINRLSDYDVDHIVPQSFLKDDSIDNKVLTRSDKNAGKSDNVPSEEVVKKMKNYWRQLLNAKLITQRKFDNLTKAERGGLSELDKAGFIKRQLVETRQITKHVAQILDSRMNTKYDENDKLIREVKVITLKSKLVSDFRKDFQFYKVREINNYHHAHDAYLNAVVGTALIKKYPKLESEFVYGDYKVYDVRKMIAKSEQEIGKATAKYFFYSNIMNFFKTEITLANGEIRKRPLIETNGETGEIVWDKGRDFATVRKVLSMPQVNIVKKTEVQTGGFSKESILPKRNSDKLIARKKDWDPKKYGGFDSPTVAYSVLVVAKVEKGKSKKLKSVKELLGITIMERSSFEKNPIDFLEAKGYKEVKKDLIIKLPKYSLFELENGRKRMLASAGELQKGNELALPSKYVNFLYLASHYEKLKGSPEDNEQKQLFVEQHKHYLDEIIEQISEFSKRVILADANLDKVLSAYNKHRDKPIREQAENIIHLFTLTNLGAPAAFKYFDTTIDRKRYTSTKEVLDATLIHQSITGLYETRIDLSQLGGD

SEQ ID NO: 114 - protein, 1053 aa, Staphylococcus aureus; identical to SEQ ID NO: 84

SEQ ID NO: 115 - protein, 1082 aa, Neisseria meningitidis
MAAFKPNSINYILGLDIGIASVGWAMVEIDEEENPIRLIDLGVRVFERAEVPKTGDSLAMARRLARSVRRLTRRRAHRLLRTRRLLKREGVLQAANFDENGLIKSLPNTPWQLRAAALDRKLTPLEWSAVLLHLIKHRGYLSQRKNEGETADKELGALLKGVAGNAHALQTGDFRTPAELALNKFEKESGHIRNQRSDYSHTFSRKDLQAELILLFEKQKEFGNPHVSGGLKEGIETLLMTQRPALSGDAVQKMLGHCTFEPAEPKAAKNTYTAERFIWLTKLNNLRILEQGSERPLTDTERATLMDEPYRKSKLTYAQARKLLGLEDTAFFKGLRYGKDNAEASTLMEMKAYHAISRALEKEGLKDKKSPLNLSPELQDEIGTAFSLFKTDEDITGRLKDRIQPEILEALLKHISFDKFVQISLKALRRIVPLMEQGKRYDEACAEIYGDHYGKKNTEEKIYLPPIPADEIRNPVVLRALSQARKVINGVVRRYGSPARIHIETAREVGKSFKDRKEIEKRQEENRKDREKAAAKFREYFPNFVGEPKSKDILKLRLYEQQHGKCLYSGKEINLGRLNEKGYVEIDAALPFSRTWDDSFNNKVLVLGSENQNKGNQTPYEYFNGKDNSREWQEFKARVETSRFPRSKKQRILLQKFDEDGFKERNLNDTRYVNRFLCQFVADRMRLTGKGKKRVFASNGQITNLLRGFWGLRKVRAENDRHHALDAVVVACSTVAMQQKITRFVRYKEMNAFDGKTIDKETGEVLHQKTHFPQPWEFFAQEVMIRVFGKPDGKPEFEEADTLEKLRTLLAEKLSSRPEAVHEYVTPLFVSRAPNRKMSGQGHMETVKSAKRLDEGVSVLRVPLTQLKLKDLEKMVNREREPKLYEALKARLEAHKDDPAKAFAEPFYKYDKAGNRTQQVKAVRVEQVQKTGVWVRNHNGIADNATMVRVDVFEKGDKYYLVPIYSWQVAKGILPDRAVVQGKDEEDWQLIDDSFNFKFSLHPNDLVEVITKKARMFGYFASCHRGTGNINIRIHDLDHKIGKNGILEGIGVKTALSFQKYQIDELGKEIRPCRLKKRPPVR

SEQ ID NO: 116 - protein, 984 aa, Campylobacter Jejuni
MARILAFDIGISSIGWAFSENDELKDCGVRIFTKVENPKTGESLALPRRLARSARKRLARRKARLNHLKHLIANEFKLNYEDYQSFDESLAKAYKGSLISPYELRFRALNELLSKQDFARVILHIAKRRGYDDIKNSDDKEKGAILKAIKQNEEKLANYQSVGEYLYKEYFQKFKENSKEFTNVRNKKESYERCIAQSFLKDELKLIFKKQREFGFSFSKKFEEEVLSVAFYKRALKDFSHLVGNCSFFTDEKRAPKNSPLAFMFVALTRIINLLNNLKNTEGILYTKDDLNALLNEVLKNGTLTYKQTKKLLGLSDDYEFKGEKGTYFIEFKKYKEFIKALGEHNLSQDDLNEIAKDITLIKDEIKLKKALAKYDLNQNQIDSLSKLEFKDHLNISFKALKLVTPLMLEGKKYDEACNELNLKVAINEDKKDFLPAFNETYYKDEVTNPVVLRAIKEYRKVLNALLKKYGKVHKINIELAREVGKNHSQRAKIEKEQNENYKAKKDAELECEKLGLKINSKNILKLRLFKEQKEFCAYSGEKIKISDLQDEKMLEIDHIYPYSRSFDDSYMNKVLVFTKQNQEKLNQTPFEAFGNDSAKWQKIEVLAKNLPTKKQKRILDKNYKDKEQKNFKDRNLNDTRYIARLVLNYTKDYLDFLPLSDDENTKLNDTQKGSKVHVEAKSGMLTSALRHTWGFSAKDRNNHLHHAIDAVIIAYANNSIVKAFSDFKKEQESNSAELYAKKISELDYKNKRKFFEPFSGFRQKVLDKIDEIFVSKPERKKPSGALHEETFRKEEEFYQSYGGKEGVLKALELGKIRKVNGKIVKNGDMFRVDIFKHKKTNKFYAVPIYTMDFALKVLPNKAVARSKKGEIKDWILMDENYEFCFSLYKDSLILIQTKDMQEPEFVYYNAFTSSTVSLIVSKHDNKFETLSKNQKILFKNANEKEVIAKSIGIQNLKVFEKYIVSALGEVTKAEFRQREDFKK

SEQ ID NO: 117 - protein, 1087 aa, G. stearothermophilus
MRYKIGLDIGITSVGWAVMNLDIPRIEDLGVRIFDRAENPQTGESLALPRRLARSARRRLRRRKHRLERIRRLVIREGILTKEELDKLFEEKHEIDVWQLRVEALDRKLNNDELARVLLHLAKRRGFKSNRKSERSNKENSTMLKHIEENRAILSSYRTVGEMIVKDPKFALHKRNKGENYTNTIARDDLEREIRLIFSKQREFGNMSCTEEFENEYITIWASQRPVASKDDIEKKVGFCTFEPKEKRAPKATYTFQSFIAWEHINKLRLISPSGARGLTDEERRLLYEQAFQKNKITYHDIRTLLHLPDDTYFKGIVYDRGESRKQNENIRFLELDAYHQIRKAVDKVYGKGKSSSFLPIDFDTFGYALTLFKDDADIHSYLRNEYEQNGKRMPNLANKVYDNELIEELLNLSFTKFGHLSLKALRSILPYMEQGEVYSSACERAGYTFTGPKKKQKTMLLPNIPPIANPVVMRALTQARKVVNAIIKKYGSPVSIHIELARDLSQTFDERRKTKKEQDENRKKNETAIRQLMEYGLTLNPTGHDIVKFKLWSEQNGRCAYSLQPIEIERLLEPGYVEVDHVIPYSRSLDDSYTNKVLVLTRENREKGNRIPAEYLGVGTERWQQFETFVLTNKQFSKKKRDRLLRLHYDENEETEFKNRNLNDTRYISRFFANFIREHLKFAESDDKQKVYTVNGRVTAHLRSRWEFNKNREESDLHHAVDAVIVACTTPSDIAKVTAFYQRREQNKELAKKTEPHFPQPWPHFADELRARLSKHPKESIKALNLGNYDDQKLESLQPVFVSRMPKRSVTGAAHQETLRRYVGIDERSGKIQTVVKTKLSEIKLDASGHFPMYGKESDPRTYEAIRQRLLEHNNDPKKAFQEPLYKPKKNGEPGPVIRTVKIIDTKNQVIPLNDGKTVAYNSNIVRVDVFEKDGKYYCVPVYTMDIMKGILPNKAIEPNKPYSEWKEMTEDYTFRFSLYPNDLIRIELPREKTVKTAAGEEINVKDVFVYYKTIDSANGGLELISHDHRFSLRGVGSRTLKRFEKYQVDVLGNIYKVRGEKRVGLASSAHSKPGKTIRPLQSTRD

SEQ ID NO: 118 - protein, 1228 aa, L-form bacterium
MSKLEKFTNCYSLSKTLRFKAIPVGKTQENIDNKRLLVEDEKRAEDYKGVKKLLDRYYLSFINDVLHSIKLKNLNNYISLFRKKTRTEKENKELENLEINLRKEIAKAFKGNEGYKSLFKKDIIETILPEFLDDKDEIALVNSFNGFTTAFTGFFDNRENMFSEEAKSTSIAFRCINENLTRYISNMDIFEKVDAIFDKHEVQEIKEKILNSDYDVEDFFEGEFFNFVLTQEGIDVYNAIIGGFVTESGEKIKGLNEYINLYNQKTKQKLPKFKPLYKQVLSDRESLSFYGEGYTSDEEVLEVFRNTLNKNSEIFSSIKKLEKLFKNFDEYSSAGIFVKNGPAISTISKDIFGEWNVIRDKWNAEYDDIHLKKKAVVTEKYEDDRRKSFKKIGSFSLEQLQEYADADLSVVEKLKEIIIQKVDEIYKVYGSSEKLFDADFVLEKSLKKNDAVVAIMKDLLDSVKSFENYIKAFFGEGKETNRDESFYGDFVLAYDILLKVDHIYDAIRNYVTQKPYSKDKFKLYFQNPQFMGGWDKDKETDYRATILRYGSKYYLAIMDKKYAKCLQKIDKDDVNGNYEKINYKLLPGPNKMLPKVFFSKKWMAYYNPSEDIQKIYKNGTFKKGDMFNLNDCHKLIDFFKDSISRYPKWSNAYDFNFSETEKYKDIAGFYREVEEQGYKVSFESASKKEVDKLVEEGKLYMFQIYNKDFSDKSHGTPNLHTMYFKLLFDENNHGQIRLSGGAELFMRRASLKKEELVVHPANSPIANKNPDNPKKTTTLSYDVYKDKRFSEDQYELHIPIAINKCPKNIFKINTEVRVLLKHDDNPYVIGIDRGERNLLYIVVVDGKGNIVEQYSLNEIINNFNGIRIKTDYHSLLDKKEKERFEARQNWTSIENIKELKAGYISQVVHKICELVEKYDAVIALEDLNSGFKNSRVKVEKQVYQKFEKMLIDKLNYMVDKKSNPCATGGALKGYQITNKFESFKSMSTQNGFIFYIPAWLTSKIDPSTGFVNLLKTKYTSIADSKKFISSFDRIMYVPEEDLFEFALDYKNFSRTDADYIKKWKLYSYGNRIRIFRNPKKNNVFDWEEVCLTSAYKELFNKYGINYQQGDIRALLCEQSDKAFYSSFMALMSLMLQMRNSITGRTDVDFLISPVKNSDGIFYDSRNYEAQENAILPKNADANGAYNIARKVLWAIGQFKKAEDEKLDKVKIAISNKEWLEYAQTSVKH

SEQ ID NO: 119 - protein, 1108 aa, Bacillus hisashii
MATRSFILKIEPNEEVKKGLWKTHEVLNHGIAYYMNILKLIRQEAIYEHHEQDPKNPKKVSKAEIQAELWDFVLKMQKCNSFTHEVDKDEVFNILRELYEELVPSSVEKKGEANQLSNKFLYPLVDPNSQSGKGTASSGRKPRWYNLKIAGDPSWEEEKKKWEEDKKKDPLAKILGKLAEYGLIPLFIPYTDSNEPIVKEIKWMEKSRNQSVRRLDKDMFIQALERFLSWESWNLKVKEEYEKVEKEYKTLEERIKEDIQALKALEQYEKERQEQLLRDTLNTNEYRLSKRGLRGWREIIQKWLKMDENEPSEKYLEVFKDYQRKHPREAGDYSVYEFLSKKENHFIWRNHPEYPYLYATFCEIDKKKKDAKQQATFTLADPINHPLWVRFEERSGSNLNKYRILTEQLHTEKLKKKLTVQLDRLIYPTESGGWEEKGKVDIVLLPSRQFYNQIFLDIEEKGKHAFTYKDESIKFPLKGTLGGARVQFDRDHLRRYPHKVESGNVGRIYFNMTVNIEPTESPVSKSLKIHRDDFPKVVNFKPKELTEWIKDSKGKKLKSGIESLEIGLRVMSIDLGQRQAAAASIFEVVDQKPDIEGKLFFPIKGTELYAVHRASFNIKLPGETLVKSREVLRKAREDNLKLMNQKLNFLRNVLHFQQFEDITEREKRVTKWISRQENSDVPLVYQDELIQIRELMYKPYKDWVAFLKQLHKRLEVEIGKEVKHWRKSLSDGRKGLYGISLKNIDEIDRTRKFLLRWSLRPTEPGEVRRLEPGQRFAIDQLNHLNALKEDRLKKMANTIIMHALGYCYDVRKKKWQAKNPACQIILFEDLSNYNPYEERSRFENSKLMKWSRREIPRQVALQGEIYGLQVGEVGAQFSSRFHAKTGSPGIRCSVVTKEKLQDNRFFKNLQREGRLTLDKIAVLKEGDLYPDKGGEKFISLSKDRKCVTTHADINAAQNLQKRFWTRTHGFYKVYCKAYQVDGQTVYIPESKDQKQKIIEEFGEGYFILKDGVYEWVNAGKLKIKKGSSKQSSSELVDSDILKDSFDLASELKGEKLMLYRDPSGNVFPSDKWMAAGVFFGKLERILISKLTNQYSISTIEDDSSKQSM

SEQ ID NO: 120 - protein, 1308 aa, Acidaminococcus sp.
MTQFEGFTNLYQVSKTLRFELIPQGKTLKHIQEQGFIEEDKARNDHYKELKPIIDRIYKTYADQCLQLVQLDWENLSAAIDSYRKEKTEETRNALIEEQATYRNAIHDYFIGRTDNLTDAINKRHAEIYKGLFKAELFNGKVLKQLGTVTTTEHENALLRSFDKFTTYFSGFYENRKNVFSAEDISTAIPHRIVQDNFPKFKENCHIFTRLITAVPSLREHFENVKKAIGIFVSTSIEEVFSFPFYNQLLTQTQIDLYNQLLGGISREAGTEKIKGLNEVLNLAIQKNDETAHIIASLPHRFIPLFKQILSDRNTLSFILEEFKSDEEVIQSFCKYKTLLRNENVLETAEALFNELNSIDLTHIFISHKKLETISSALCDHWDTLRNALYERRISELTGKITKSAKEKVRQRSLKHEDINLQEIISAAGKELSEAFKQKTSEILSHAHAALDQPLPTTLKKQEEKEILKSQLDSLLGLYHLLDWFAVDESNEVDPEFSARLTGIKLEMEPSLSFYNKARNYATKKPYSVEKFKLNFQMPTLASGWDVNKEKNNGAILFVKNGLYYLGIMPKQKGRYKALSFEPTEKTSEGFDKMYYDYFPDAAKMIPKCSTQLKAVTAHFQTHTTPILLSNNFIEPLEITKEIYDLNNPEKEPKKFQTAYAKKTGDQKGYREALCKWIDFTRDFLSKYTKTTSIDLSSLRPSSQYKDLGEYYAELNPLLYHISFQRIAEKEIMDAVETGKLYLFQIYNKDFAKGHHGKPNLHTLYWTGLFSPENLAKTSIKLNGQAELFYRPKSRMKRMAHRLGEKMLNKKLKDQKTPIPDTLYQELYDYVNHRLSHDLSDEARALLPNVITKEVSHEIIKDRRFTSDKFFFHVPITLNYQAANSPSKFNQRVNAYLKEHPETPIIGIDRGERNLIYITVIDSTGKILEQRSLNTIQQFDYQKKLDNREKERVAARQAWSVVGTIKDLKQGYLSQVIHEIVDLMIHYQAVVVLENLNFGFKSKRTGIAEKAVYQQFEKMLIDKLNCLVLKDYPAEKVGGVLNPYQLTDQFTSFAKMGTQSGFLFYVPAPYTSKIDPLTGFVDPFVWKTIKNHESRKHFLEGFDFLHYDVKTGDFILHFKMNRNLSFQRGLPGFMPAWDIVFEKNETQFDAKGTPFIAGKRIVPVIENHRFTGRYRDLYPANELIALLEEKGIVFRDGSNILPKLLENDDSHAIDTMVALIRSVLQMRNSNAATGEDYINSPVRDLNGVCFDSRFQNPEWPMDADANGAYHIALKGQLLLNHLKESKDLKLQNGISNQDWLAYIQELRN

SEQ ID NO: 121 - protein, 1308 aa, Artificial Sequence
  Synthetic
MTQFEGFTNLYQVSKTLRFELIPQGKTLKHIQEQGFIEEDKARNDHYKELKPIIDRIYKTYADQCLQLVQLDWENLSAAIDSYRKEKTEETRNALIEEQATYRNAIHDYFIGRTDNLTDAINKRHAEIYKGLFKAELFNGKVLKQLGTVTTTEHENALLRSFDKFTTYFSGFYENRKNVFSAEDISTAIPHRIVQDNFPKFKENCHIFTRLITAVPSLREHFENVKKAIGIFVSTSIEEVFSFPFYNQLLTQTQIDLYNQLLGGISREAGTEKIKGLNEVLNLAIQKNDETAHIIASLPHRFIPLFKQILSDRNTLSFILEEFKSDEEVIQSFCKYKTLLRNENVLETAEALFNELNSIDLTHIFISHKKLETISSALCDHWDTLRNALYERRISELTGKITKSAKEKVRQRSLKHEDINLQEIISAAGKELSEAFKQKTSEILSHAHAALDQPLPTTLKKQEEKEILKSQLDSLLGLYHLLDWFAVDESNEVDPEFSARLTGIKLEMEPSLSFYNKARNYATKKPYSVEKFKLNFQMPTLASGWDVNKEKNNGAILFVKNGLYYLGIMPKQKGRYKALSFEPTEKTSEGFDKMYYDYFPDAAKMIPKCSTQLKAVTAHFQTHTTPILLSNNFIEPLEITKEIYDLNNPEKEPKKFQTAYAKKTGDQKGYREALCKWIDFTRDFLSKYTKTTSIDLSSLRPSSQYKDLGEYYAELNPLLYHISFQRIAEKEIMDAVETGKLYLFQIYNKDFAKGHHGKPNLHTLYWTGLFSPENLAKTSIKLNGQAELFYRPKSRMKRMAHRLGEKMLNKKLKDQKTPIPDTLYQELYDYVNHRLSHDLSDEARALLPNVITKEVSHEIIKDRRFTSDKFFFHVPITLNYQAANSPSKFNQRVNAYLKEHPETPIIGIDRGERNLIYITVIDSTGKILEQRSLNTIQQFDYQKKLDNREKERVAARQAWSVVGTIKDLKQGYLSQVIHEIVDLMIHYQAVVVLENLNFGFKSKRTGIAEKAVYQQFEKMLIDKLNCLVLKDYPAEKVGGVLNPYQLTDQFTSFAKMGTQSGFLFYVPAPYTSKIDPLTGFVDPFVWKTIKNHESRKHFLEGFDFLHYDVKTGDFILHFKMNRNLSFQRGLPGFMPAWDIVFEKNETQFDAKGTPFIAGKRIVPVIENHRFTGRYRDLYPANELIALLEEKGIVFRDGSNILPKLLENDDSHAIDTMVALIRSVLQMANSNAATGEDYINSPVRDLNGVCFDSRFQNPEWPMDADANGAYHIALKGQLLLNHLKESKDLKLQNGISNQDWLAYIQELRN

SEQ ID NO: 122 - protein, 1259 aa, Lachnospiraceae bacterium
MNYKTGLEDFIGKESLSKTLRNALIPTESTKIHMEEMGVIRDDELRAEKQQELKEIMDDYYRTFIEEKLGQIQGIQWNSLFQKMEETMEDISVRKDLDKIQNEKRKEICCYFTSDKRFKDLFNAKLITDILPNFIKDNKEYTEEEKAEKEQTRVLFQRFATAFTNYFNQRRNNFSEDNISTAISFRIVNENSEIHLQNMRAFQRIEQQYPEEVCGMEEEYKDMLQEWQMKHIYSVDFYDRELTQPGIEYYNGICGKINEHMNQFCQKNRINKNDFRMKKLHKQILCKKSSYYEIPFRFESDQEVYDALNEFIKTMKKKEIIRRCVHLGQECDDYDLGKIYISSNKYEQISNALYGSWDTIRKCIKEEYMDALPGKGEKKEEKAEAAAKKEEYRSIADIDKIISLYGSEMDRTISAKKCITEICDMAGQISIDPLVCNSDIKLLQNKEKTTEIKTILDSFLHVYQWGQTFIVSDIIEKDSYFYSELEDVLEDFEGITTLYNHVRSYVTQKPYSTVKFKLHFGSPTLANGWSQSKEYDNNAILLMRDQKFYLGIFNVRNKPDKQIIKGHEKEEKGDYKKMIYNLLPGPSKMLPKVFITSRSGQETYKPSKHILDGYNEKRHIKSSPKFDLGYCWDLIDYYKECIHKHPDWKNYDFHFSDTKDYEDISGFYREVEMQGYQIKWTYISADEIQKLDEKGQIFLFQIYNKDFSVHSTGKDNLHTMYLKNLFSEENLKDIVLKLNGEAELFFRKASIKTPIVHKKGSVLVNRSYTQTVGNKEIRVSIPEEYYTEIYNYLNHIGKGKLSSEAQRYLDEGKIKSFTATKDIVKNYRYCCDHYFLHLPITINFKAKSDVAVNERTLAYIAKKEDIHIIGIDRGERNLLYISVVDVHGNIREQRSFNIVNGYDYQQKLKDREKSRDAARKNWEEIEKIKELKEGYLSMVIHYIAQLVVKYNAVVAMEDLNYGFKTGRFKVERQVYQKFETMLIEKLHYLVFKDREVCEEGGVLRGYQLTYIPESLKKVGKQCGFIFYVPAGYTSKIDPTTGFVNLFSFKNLTNRESRQDFVGKFDEIRYDRDKKMFEFSFDYNNYIKKGTILASTKWKVYTNGTRLKRIVVNGKYTSQSMEVELTDAMEKMLQRAGIEYHDGKDLKGQIVEKGIEAEIIDIFRLTVQMRNSRSESEDREYDRLISPVLNDKGEFFDTATADKTLPQDADANGAYCIALKGLYEVKQIKENWKENEQFPRNKLVQDNKTWFDFMQKKRYL

SEQ ID NO: 123 - protein, 1306 aa, Prevotella copri
MAKNFEDFKRLYSLSKTLRFEAKPIGATLDNIVKSGLLDEDEHRAASYVKVKKLIDEYHKVFIDRVLDDGCLPLENKGNNNSLAEYYESYVSRAQDEDAKKKFKEIQQNLRSVIAKKLTEDKAYANLFGNKLIESYKDKEDKKKIIDSDLIQFINTAESTQLDSMSQDEAKELVKEFWGFVTYFYGFFDNRKNMYTAEEKSTGIAYRLVNENLPKFIDNIEAFNRAITRPEIQENMGVLYSDFSEYLNVESIQEMFQLDYYNMLLTQKQIDVYNAIIGGKTDDEHDVKIKGINEYINLYNQQHKDDKLPKLKALFKQILSDRNAISWLPEEFNSDQEVLNAIKDCYERLAENVLGDKVLKSLLGSLADYSLDGIFIRNDLQLTDISQKMFGNWGVIQNAIMQNIKRVAPARKHKESEEDYEKRIAGIFKKADSFSISYINDCLNEADPNNAYFVENYFATFGAVNTPTMQRENLFALVQNAYTEVAALLHSDYPTVKHLAQDKANVSKIKALLDAIKSLQHFVKPLLGKGDESDKDERFYGELASLWAELDTVTPLYNMIRNYMTRKPYSQKKIKLNFENPQLLGGWDANKEKDYATIILRRNGLYYLAIMDKDSRKLLGKAMPSDGECYEKMVYKFFKDVTTMIPKCSTQLKDVQAYFKVNTDDYVLNSKAFNKPLTITKEVFDLNNVLYGKYKKFQKGYLTATGDNVGYTHAVNVWIKFCMDFLNSYDSTCIYDFSSLKPESYLSLDAFYQDANLLLYKLSFARASVSYINQLVEEGKMYLFQIYNKDFSEYSKGTPNMHTLYWKALFDERNLADVVYKLNGQAEMFYRKKSIENTHPTHPANHPILNKNKDNKKKESLFDYDLIKDRRYTVDKFMFHVPITMNFKSVGSENINQDVKAYLRHADDMHIIGIDRGERHLLYLVVIDLQGNIKEQYSLNEIVNEYNGNTYHTNYHDLLDVREEERLKARQSWQTIENIKELKEGYLSQVIHKITQLMVRYHAIVVLEDLSKGFMRSRQKVEKQVYQKFEKMLIDKLNYLVDKKTDVSTPGGLLNAYQLTCKSDSSQKLGKQSGFLFYIPAWNTSKIDPVTGFVNLLDTHSLNSKEKIKAFFSKFDAIRYNKDKKWFEFNLDYDKFGKKAEDTRTKWTLCTRGMRIDTFRNKEKNSQWDNQEVDLTTEMKSLLEHYYIDIHGNLKDAISAQTDKAFFTGLLHILKLTLQMRNSITGTETDYLVSPVADENGIFYDSRSCGNQLPENADANGAYNIARKGLMLIEQIKNAEDLNNVKFDISNKAWLNFAQQKPYKNG

SEQ ID NO: 124 - protein, 1142 aa, Eubacterium rectale
MFSAKLISDILPEFVIHNNNYSASEKEEKTQVIKLFSRFATSFKDYFKNRANCFSANDISSSSCHRIVNDNAEIFFSNALVYRRIVKNLSNDDINKISGDMKDSLKEMSLEEIYSYEKYGEFITQEGISFYNDICGKVNLFMNLYCQKNKENKNLYKLRKLHKQILCIADTSYEVPYKFESDEEVYQSVNGFLDNISSKHIVERLRKIGENYNGYNLDKIYIVSKFYESVSQKTYRDWETINTALEIHYNNILPGNGKSKADKVKKAVKNDLQKSITEINELVSNYKLCPDDNIKAETYIHEISHILNNFEAQELKYNPEIHLVESELKASELKNVLDVIMNAFHWCSVFMTEELVDKDNNFYAELEEIYDEIYPVISLYNLVRNYVTQKPYSTKKIKLNFGIPTLADGWSKSKEYSNNAIILMRDNLYYLGIFNAKNKPDKKIIEGNTSENKGDYKKMIYNLLPGPNKMIPKVFLSSKTGVETYKPSAYILEGYKQNKHLKSSKDFDITFCHDLIDYFKNCIAIHPEWKNFGFDFSDTSTYEDISGFYREVELQGYKIDWTYISEKDIDLLQEKGQLYLFQIYNKDFSKKSSGNDNLHTMYLKNLFSEENLKDIVLKLNGEAEIFFRKSSIKNPIIHKKGSILVNRTYEAEEKDQFGNIQIVRKTIPENIYQELYKYFNDKSDKELSDEAAKLKNVVGHHEAATNIVKDYRYTYDKYFLHMPITINFKANKTSFINDRILQYIAKEKDLHVIGIDRGERNLIYVSVIDTCGNIVEQKSFNIVNGYDYQIKLKQQEGARQIARKEWKEIGKIKEIKEGYLSLVIHEISKMVIKYNAIIAMEDLSYGFKKGRFKVERQVYQKFETMLINKLNYLVFKDISITENGGLLKGYQLTYIPDKLKNVGHQCGCIFYVPAAYTSKIDPTTGFVNIFKFKDLTVDAKREFIKKFDSIRYDSDKNLFCFTFDYNNFITQNTVMSKSSWSVYTYGVRIKRRFVNGRFSNESDTIDITKDMEKTLEMTDINWRDGHDLRQDIIDYEIVQHIFEIFKLTVQMRNSLSELEDRDYDRLISPVLNENNIFYDSAKAGDALPKDADANGAYCIALKGLYEIKQITENWKEDGKFSRDKLKISNKDWFDFIQNKRYL

SEQ ID NO: 125 - protein, 1259 aa, Clostridium sp.
MNYKTGLEDFIGKESLSKTLRNALIPTESTKIHMEEMGVIRDDELRAEKQQELKEIMDDYYRAFIEEKLGQIQGIQWNSLFQKMEETMEDISVRKDLDKIQNEKRKEICCYFTSDKRFKDLFNAKLITDILPNFIKDNKEYTEEEKAEKEQTRVLFQRFATAFTNYFNQRRNNFSEDNISTAISFRIVNENSEIHLQNMRAFQRIEQQYPEEVCGMEEEYKDMLQEWQMKHIYLVDFYDRVLTQPGIEYYNGICGKINEHMNQFCQKNRINKNDFRMKKLHKQILCKKSSYYEIPFRFESDQEVYDALNEFIKTMKEKEIICRCVHLGQKCDDYDLGKIYISSNKYEQISNALYGSWDTIRKCIKEEYMDALPGKGEKKEEKAEAAAKKEEYRSIADIDKIISLYGSEMDRTISAKKCITEICDMAGQISTDPLVCNSDIKLLQNKEKTTEIKTILDSFLHVYQWGQTFIVSDIIEKDSYFYSELEDVLEDFEGITTLYNHVRSYVTQKPYSTVKFKLHFGSPTLANGWSQSKEYDNNAILLMRDQKFYLGIFNVRNKPDKQIIKGHEKEEKGDYKKMIYNLLPGPSKMLPKVFITSRSGQETYKPSKHILDGYNEKRHIKSSPKFDLGYCWDLIDYYKECIHKHPDWKNYDFHFSDTKDYEDISGFYREVEMQGYQIKWTYISADEIQKLDEKGQIFLFQIYNKDFSVHSTGKDNLHTMYLKNLFSEENLKDIVLKLNGEAELFFRKASIKTPVVHKKGSVLVNRSYTQTVGDKEIRVSIPEEYYTEIYNYLNHIGRGKLSTEAQRYLEERKIKSFTATKDIVKNYRYCCDHYFLHLPITINFKAKSDIAVNERTLAYIAKKEDIHIIGIDRGERNLLYISVVDVHGNIREQRSFNIVNGYDYQQKLKDREKSRDAARKNWEEIEKIKELKEGYLSMVIHYIAQLVVKYNAVVAMEDLNYGFKTGRFKVERQVYQKFETMLIEKLHYLVFKDREVCEEGGVLRGYQLTYIPESLKKVGKQCGFIFYVPAGYTSKIDPTTGFVNLFSFKNLTNRESRQDFVGKFDEIRYDRDKKMFEFSFDYNNYIKKGTMLASTKWKVYTNGTRLKRIVVNGKYTSQSMEVELTDAMEKMLQRAGIEYHDGKDLKGQIVEKGIEAEIIDIFRLTVQMRNSRSESEDREYDRLISPVLNDKGEFFDTATADKTLPQDADANGAYCIALKGLYEVKQIKENWKENEQFPRNKLVQDNKTWFDFMQKKRYL

SEQ ID NO: 126 - protein, 1108 aa, Bacillus hisashii; identical to SEQ ID NO: 119

SEQ ID NO: 127 - protein, 1465 aa, Thermomonas hydrothermalis
MSEKTTQRAYTLRLNRASGECAVCQNNSCDCWHDALWATHKAVNRGAKAFGDWLLTLRGGLCHTLVEMEVPAKGNNPPQRPTDQERRDRRVLLALSWLSVEDEHGAPKEFIVATGRDSADDRAKKVEEKLREILEKRDFQEHEIDAWLQDCGPSLKAHIREDAVWVNRRALFDAAVERIKTLTWEEAWDFLEPFFGTQYFAGIGDGKDKDDAEGPARQGEKAKDLVQKAGQWLSARFGIGTGADFMSMAEAYEKIAKWASQAQNGDNGKATIEKLACALRPSEPPTLDTVLKCISGPGHKSATREYLKTLDKKSTVTQEDLNQLRKLADEDARNCRKKVGKKGKKPWADEVLKDVENSCELTYLQDNSPARHREFSVMLDHAARRVSMAHSWIKKAEQRRRQFESDAQKLKNLQERAPSAVEWLDRFCESRSMTTGANTGSGYRIRKRAIEGWSYVVQAWAEASCDTEDKRIAAARKVQADPEIEKFGDIQLFEALAADEAICVWRDQEGTQNPSILIDYVTGKTAEHNQKRFKVPAYRHPDELRHPVFCDFGNSRWSIQFAIHKEIRDRDKGAKQDTRQLQNRHGLKMRLWNGRSMTDVNLHWSSKRLTADLALDQNPNPNPTEVTRADRLGRAASSAFDHVKIKNVFNEKEWNGRLQAPRAELDRIAKLEEQGKTEQAEKLRKRLRWYVSFSPCLSPSGPFIVYAGQHNIQPKRSGQYAPHAQANKGRARLAQLILSRLPDLRILSVDLGHRFAAACAVWETLSSDAFRREIQGLNVLAGGSGEGDLFLHVEMTGDDGKRRTVVYRRIGPDQLLDNTPHPAPWARLDRQFLIKLQGEDEGVREASNEELWTVHKLEVEVGRTVPLIDRMVRSGFGKTEKQKERLKKLRELGWISAMPNEPSAETDEKEGEIRSISRSVDELMSSALGTLRLALKRHGNRARIAFAMTADYKPMPGGQKYYFHEAKEASKNDDETKRRDNQIEFLQDALSLWHDLFSSPDWEDNEAKKLWQNHIATLPNYQTPEEISAELKRVERNKKRKENRDKLRTAAKALAENDQLRQHLHDTWKERWESDDQQWKERLRSLKDWIFPRGKAEDNPSIRHVGGLSITRINTISGLYQILKAFKMRPEPDDLRKNIPQKGDDELENFNRRLLEARDRLREQRVKQLASRIIEAALGVGRIKIPKNGKLPKRPRTTVDTPCHAVVIESLKTYRPDDLRTRRENRQLMQWSSAKVRKYLKEGCELYGLHFLEVPANYTSRQCSRTGLPGIRCDDVPTGDFLKAPWWRRAINTAREKNGGDAKDRFLVDLYDHLNNLQSKGEALPATVRVPRQGGNLFIAGAQLDDTNKERRAIQADLNAAANIGLRALLDPDWRGRWWYVPCKDGTSEPALDRIEGSTAFNDVRSLPTGDNSSRRAPREIENLWRDPSGDSLESGTWSPTRAYWDTVQSRVIELLRRHAGLPTS

SEQ ID NO: 128 - protein, 1091 aa, Laceyella sacchari
MSIRSFKLKLKTKSGVNAEQLRRGLWRTHQLINDGIAYYMNWLVLLRQEDLFIRNKETNEIEKRSKEEIQAVLLERVHKQQQRNQWSGEVDEQTLLQALRQLYEEIVPSVIGKSGNASLKARFFLGPLVDPNNKTTKDVSKSGPTPKWKKMKDAGDPNWVQEYEKYMAERQTLVRLEEMGLIPLFPMYTDEVGDIHWLPQASGYTRTWDRDMFQQAIERLLSWESWNRRVRERRAQFEKKTHDFASRFSESDVQWMNKLREYEAQQEKSLEENAFAPNEPYALTKKALRGWERVYHSWMRLDSAASEEAYWQEVATCQTAMRGEFGDPAIYQFLAQKENHDIWRGYPERVIDFAELNHLQRELRRAKEDATFTLPDSVDHPLWVRYEAPGGTNIHGYDLVQDTKRNLTLILDKFILPDENGSWHEVKKVPFSLAKSKQFHRQVWLQEEQKQKKREVVFYDYSTNLPHLGTLAGAKLQWDRNFLNKRTQQQIEETGEIGKVFFNISVDVRPAVEVKNGRLQNGLGKALTVLTHPDGTKIVTGWKAEQLEKWVGESGRVSSLGLDSLSEGLRVMSIDLGQRTSATVSVFEITKEAPDNPYKFFYQLEGTEMFAVHQRSFLLALPGENPPQKIKQMREIRWKERNRIKQQVDQLSAILRLHKKVNEDERIQAIDKLLQKVASWQLNEEIATAWNQALSQLYSKAKENDLQWNQAIKNAHHQLEPVVGKQISLWRKDLSTGRQGIAGLSLWSIEELEATKKLLTRWSKRSREPGVVKRIERFETFAKQIQHHINQVKENRLKQLANLIVMTALGYKYDQEQKKWIEVYPACQVVLFENLRSYRFSFERSRRENKKLMEWSHRSIPKLVQMQGELFGLQVADVYAAYSSRYHGRTGAPGIRCHALTEADLRNETNIIHELIEAGFIKEEHRPYLQQGDLVPWSGGELFATLQKPYDNPRILTLHADINAAQNIQKRFWHPSMWFRVNCESVMEGEIVTYVPKNKTVHKKQGKTFRFVKVEGSDVYEWAKWSKNRNKNTFSSITERKPPSSMILFRDPSGTFFKEQEWVEQKTFWGKVQSMIQAYMKKTIVRQRMEE

SEQ ID NO: 129 - protein, 1194 aa, Dsulfonatronum thiodismutans
MVLGRKDDTAELRRALWTTHEHVNLAVAEVERVLLRCRGRSYWTLDRRGDPVHVPESQVAEDALAMAREAQRRNGWPVVGEDEEILLALRYLYEQIVPSCLLDDLGKPLKGDAQKIGTNYAGPLFDSDTCRRDEGKDVACCGPFHEVAGKYLGALPEWATPISKQEFDGKDASHLRFKATGGDDAFFRVSIEKANAWYEDPANQDALKNKAYNKDDWKKEKDKGISSWAVKYIQKQLQLGQDPRTEVRRKLWLELGLLPLFIPVFDKTMVGNLWNRLAVRLALAHLLSWESWNHRAVQDQALARAKRDELAALFLGMEDGFAGLREYELRRNESIKQHAFEPVDRPYVVSGRALRSWTRVREEWLRHGDTQESRKNICNRLQDRLRGKFGDPDVFHWLAEDGQEALWKERDCVTSFSLLNDADGLLEKRKGYALMTFADARLHPRWAMYEAPGGSNLRTYQIRKTENGLWADVVLLSPRNESAAVEEKTFNVRLAPSGQLSNVSFDQIQKGSKMVGRCRYQSANQQFEGLLGGAEILFDRKRIANEQHGATDLASKPGHVWFKLTLDVRPQAPQGWLDGKGRPALPPEAKHFKTALSNKSKFADQVRPGLRVLSVDLGVRSFAACSVFELVRGGPDQGTYFPAADGRTVDDPEKLWAKHERSFKITLPGENPSRKEEIARRAAMEELRSLNGDIRRLKAILRLSVLQEDDPRTEHLRLFMEAIVDDPAKSALNAELFKGFGDDRFRSTPDLWKQHCHFFHDKAEKVVAERFSRWRTETRPKSSSWQDWRERRGYAGGKSYWAVTYLEAVRGLILRWNMRGRTYGEVNRQDKKQFGTVASALLHHINQLKEDRIKTGADMIIQAARGFVPRKNGAGWVQVHEPCRLILFEDLARYRFRTDRSRRENSRLMRWSHREIVNEVGMQGELYGLHVDTTEAGFSSRYLASSGAPGVRCRHLVEEDFHDGLPGMHLVGELDWLLPKDKDRTANEARRLLGGMVRPGMLVPWDGGELFATLNAASQLHVIHADINAAQNLQRRFWGRCGEAIRIVCNQLSVDGSTRYEMAKAPKARLLGALQQLKNGDAPFHLTSIPNSQKPENSYVMTPTNAGKKYRAGPGEKSSGEEDELALDIVEQAEELAQGRKTFFRDPSGVFFAPDRWLPSEIYWSRIRRRIWQVTLERNSSGRQERAEMDEMPY

SEQ ID NO: 130 - protein, 1300 aa, Francisella novicida
MSIYQEFVNKYSLSKTLRFELIPQGKTLENIKARGLILDDEKRAKDYKKAKQIIDKYHQFFIEEILSSVCISEDLLQNYSDVYFKLKKSDDDNLQKDFKSAKDTIKKQISEYIKDSEKFKNLFNQNLIDAKKGQESDLILWLKQSKDNGIELFKANSDITDIDEALEIIKSFKGWTTYFKGFHENRKNVYSSNDIPTSIIYRIVDDNLPKFLENKAKYESLKDKAPEAINYEQIKKDLAEELTFDIDYKTSEVNQRVFSLDEVFEIANFNNYLNQSGITKFNTIIGGKFVNGENTKRKGINEYINLYSQQINDKTLKKYKMSVLFKQILSDTESKSFVIDKLEDDSDVVTTMQSFYEQIAAFKTVEEKSIKETLSLLFDDLKAQKLDLSKIYFKNDKSLTDLSQQVFDDYSVIGTAVLEYITQQIAPKNLDNPSKKEQELIAKKTEKAKYLSLETIKLALEEFNKHRDIDKQCRFEEILANFAAIPMIFDEIAQNKDNLAQISIKYQNQGKKDLLQASAEDDVKAIKDLLDQTNNLLHKLKIFHISQSEDKANILDKDEHFYLVFEECYFELANIVPLYNKIRNYITQKPYSDEKFKLNFENSTLANGWDKNKEPDNTAILFIKDDKYYLGVMNKKNNKIFDDKAIKENKGEGYKKIVYKLLPGANKMLPKVFFSAKSIKFYNPSEDILRIRNHSTHTKNGSPQKGYEKFEFNIEDCRKFIDFYKQSISKHPEWKDFGFRFSDTQRYNSIDEFYREVENQGYKLTFENISESYIDSVVNQGKLYLFQIYNKDFSAYSKGRPNLHTLYWKALFDERNLQDVVYKLNGEAELFYRKQSIPKKITHPAKEAIANKNKDNPKKESVFEYDLIKDKRFTEDKFFFHCPITINFKSSGANKFNDEINLLLKEKANDVHILSIDRGERHLAYYTLVDGKGNIIKQDTFNIIGNDRMKTNYHDKLAAIEKDRDSARKDWKKINNIKEMKEGYLSQVVHEIAKLVIEYNAIVVFEDLNFGFKRGRFKVEKQVYQKLEKMLIEKLNYLVFKDNEFDKTGGVLRAYQLTAPFETFKKMGKQTGIIYYVPAGFTSKICPVTGFVNQLYPKYESVSKSQEFFSKFDKICYNLDKGYFEFSFDYKNFGDKAAKGKWTIASFGSRLINFRNSDKNHNWDTREVYPTKELEKLLKDYSIEYGHGECIKAAICGESDKKFFAKLTSVLNTILQMRNSKTGTELDYLISPVADVNGNFFDSRQAPKNMPQDADANGAYHIGLKGLMLLGRIKNNQEGKKLNLVIKNEEYFEFVQNRNN

SEQ ID NO: 131 - protein, 1082 aa, Geobacillus thermodenitrificans; identical to SEQ ID NO: 94

SEQ ID NO: 132 - protein, 887 aa, Natronobacterium gregoryi
MTVIDLDSTTTADELTSGHTYDISVTLTGVYDNTDEQHPRMSLAFEQDNGERRYITLWKNTTPKDVFTYDYATGSTYIFTNIDYEVKDGYENLTATYQTTVENATAQEVGTTDEDETFAGGEPLDHHLDDALNETPDDAETESDSGHVMTSFASRDQLPEWTLHTYTLTATDGAKTDTEYARRTLAYTVRQELYTDHDAAPVATDGLMLLTPEPLGETPLDLDCGVRVEADETRTLDYTTAKDRLLARELVEEGLKRSLWDDYLVRGIDEVLSKEPVLTCDEFDLHERYDLSVEVGHSGRAYLHINFRHRFVPKLTLADIDDDNIYPGLRVKTTYRPRRGHIVWGLRDECATDSLNTLGNQSVVAYHRNNQTPINTDLLDAIEAADRRVVETRRQGHGDDAVSFPQELLAVEPNTHQIKQFASDGFHQQARSKTRLSASRCSEKAQAFAERLDPVRLNGSTVEFSSEFFTGNNEQQLRLLYENGESVLTFRDGARGAHPDETFSKGIVNPPESFEVAVVLPEQQADTCKAQWDTMADLLNQAGAPPTRSETVQYDAFSSPESISLNVAGAIDPSEVDAAFVVLPPDQEGFADLASPTETYDELKKALANMGIYSQMAYFDRFRDAKIFYTRNVALGLLAAAGGVAFTTEHAMPGDADMFIGIDVSRSYPEDGASGQINIAATATAVYKDGTILGHSSTRPQLGEKLQSTDVRDIMKNAILGYQQVTGESPTHIVIHRDGFMNEDLDPATEFLNEQGVEYDIVEIRKQPQTRLLAVSDVQYDTPVKSIAAINQNEPRATVATFGAPEYLATRDGGGLPRPIQIERVAGETDIETLTRQVYLLSQSHIQVHNSTARLPITTAYADQASTHATKGYLVQTGAFESNVGFL

SEQ ID NO: 133 - protein, 1367 aa, Artificial Sequence
  Synthetic
DKKYSIGLDIGTNSVGWAVITDEYKVPSKKFKVLGNTDRHSIKKNLIGALLFDSGETAEATRLKRTARRRYTRRKNRICYLQEIFSNEMAKVDDSFFHRLEESFLVEEDKKHERHPIFGNIVDEVAYHEKYPTIYHLRKKLVDSTDKADLRLIYLALAHMIKFRGHFLIEGDLNPDNSDVDKLFIQLVQTYNQLFEENPINASGVDAKAILSARLSKSRRLENLIAQLPGEKKNGLFGNLIALSLGLTPNFKSNFDLAEDAKLQLSKDTYDDDLDNLLAQIGDQYADLFLAAKNLSDAILLSDILRVNTEITKAPLSASMIKRYDEHHQDLTLLKALVRQQLPEKYKEIFFDQSKNGYAGYIDGGASQEEFYKFIKPILEKMDGTEELLVKLNREDLLRKQRTFDNGSIPHQIHLGELHAILRRQEDFYPFLKDNREKIEKILTFRIPYYVGPLARGNSRFAWMTRKSEETITPWNFEEVVDKGASAQSFIERMTNFDKNLPNEKVLPKHSLLYEYFTVYNELTKVKYVTEGMRKPAFLSGEQKKAIVDLLFKTNRKVTVKQLKEDYFKKIECFDSVEISGVEDRFNASLGTYHDLLKIIKDKDFLDNEENEDILEDIVLTLTLFEDREMIEERLKTYAHLFDDKVMKQLKRRRYTGWGRLSRKLINGIRDKQSGKTILDFLKSDGFANRNFMQLIHDDSLTFKEDIQKAQVSGQGDSLHEHIANLAGSPAIKKGILQTVKVVDELVKVMGRHKPENIVIEMARENQTTQKGQKNSRERMKRIEEGIKELGSQILKEHPVENTQLQNEKLYLYYLQNGRDMYVDQELDINRLSDYDVDAIVPQSFLKDDSIDNKVLTRSDKNRGKSDNVPSEEVVKKMKNYWRQLLNAKLITQRKFDNLTKAERGGLSELDKAGFIKRQLVETRQITKHVAQILDSRMNTKYDENDKLIREVKVITLKSKLVSDFRKDFQFYKVREINNYHHAHDAYLNAVVGTALIKKYPKLESEFVYGDYKVYDVRKMIAKSEQEIGKATAKYFFYSNIMNFFKTEITLANGEIRKRPLIETNGETGEIVWDKGRDFATVRKVLSMPQVNIVKKTEVQTGGFSKESILPKRNSDKLIARKKDWDPKKYGGFVSPTVAYSVLVVAKVEKGKSKKLKSVKELLGITIMERSSFEKNPIDFLEAKGYKEVKKDLIIKLPKYSLFELENGRKRMLASARELQKGNELALPSKYVNFLYLASHYEKLKGSPEDNEQKQLFVEQHKHYLDEIIEQISEFSKRVILADANLDKVLSAYNKHRDKPIREQAENIIHLFTLTNLGAPAAFKYFDTTIDRKQYRSTKEVLDATLIHQSITGLYETRIDLSQLGGD

SEQ ID NO: 134 - protein, 1367 aa, Artificial Sequence
  Synthetic
DKKYSIGLDIGTNSVGWAVITDEYKVPSKKFKVLGNTDRHSIKKNLIGALLFDSGETAEATRLKRTARRRYTRRKNRICYLQEIFSNEMAKVDDSFFHRLEESFLVEEDKKHERHPIFGNIVDEVAYHEKYPTIYHLRKKLVDSTDKADLRLIYLALAHMIKFRGHFLIEGDLNPDNSDVDKLFIQLVQTYNQLFEENPINASGVDAKAILSARLSKSRRLENLIAQLPGEKKNGLFGNLIALSLGLTPNFKSNFDLAEDAKLQLSKDTYDDDLDNLLAQIGDQYADLFLAAKNLSDAILLSDILRVNTEITKAPLSASMIKRYDEHHQDLTLLKALVRQQLPEKYKEIFFDQSKNGYAGYIDGGASQEEFYKFIKPILEKMDGTEELLVKLNREDLLRKQRTFDNGSIPHQIHLGELHAILRRQEDFYPFLKDNREKIEKILTFRIPYYVGPLARGNSRFAWMTRKSEETITPWNFEEVVDKGASAQSFIERMTNFDKNLPNEKVLPKHSLLYEYFTVYNELTKVKYVTEGMRKPAFLSGEQKKAIVDLLFKTNRKVTVKQLKEDYFKKIECFDSVEISGVEDRFNASLGTYHDLLKIIKDKDFLDNEENEDILEDIVLTLTLFEDREMIEERLKTYAHLFDDKVMKQLKRRRYTGWGRLSRKLINGIRDKQSGKTILDFLKSDGFANRNFMQLIHDDSLTFKEDIQKAQVSGQGDSLHEHIANLAGSPAIKKGILQTVKVVDELVKVMGRHKPENIVIEMARENQTTQKGQKNSRERMKRIEEGIKELGSQILKEHPVENTQLQNEKLYLYYLQNGRDMYVDQELDINRLSDYDVDAIVPQSFLKDDSIDNKVLTRSDKNRGKSDNVPSEEVVKKMKNYWRQLLNAKLITQRKFDNLTKAERGGLSELDKAGFIKRQLVETRQITKHVAQILDSRMNTKYDENDKLIREVKVITLKSKLVSDFRKDFQFYKVREINNYHHAHDAYLNAVVGTALIKKYPKLESEFVYGDYKVYDVRKMIAKSEQEIGKATAKYFFYSNIMNFFKTEITLANGEIRKRPLIETNGETGEIVWDKGRDFATVRKVLSMPQVNIVKKTEVQTGGFSKESILPKRNSDKLIARKKDWDPKKYGGFVSPTVAYSVLVVAKVEKGKSKKLKSVKELLGITIMERSSFEKNPIDFLEAKGYKEVKKDLIIKLPKYSLFELENGRKRMLASARELQKGNELALPSKYVNFLYLASHYEKLKGSPEDNEQKQLFVEQHKHYLDEIIEQISEFSKRVILADANLDKVLSAYNKHRDKPIREQAENIIHLFTLTNLGAPAAFKYFDTTIDRKEYRSTKEVLDATLIHQSITGLYETRIDLSQLGGD

SEQ ID NO: 135 - protein, 16 aa, Artificial Sequence
  Synthetic
SGSETPGTSESATPES

SEQ ID NO: 136 - protein, 32 aa, Artificial Sequence
  Synthetic
SGGSSGGSSGSETPGTSESATPESSGGSSGGS

SEQ ID NO: 137 - protein, 4 aa, Artificial Sequence
  Synthetic
  REPEAT (1)..(4)
SGGS

SEQ ID NO: 138 - protein, 4 aa, Artificial Sequence
  Synthetic
  REPEAT (1)..(4)
GGGS

SEQ ID NO: 139 - protein, 5 aa, Artificial Sequence
  Synthetic
  REPEAT (1)..(5)
GGGGS

SEQ ID NO: 140 - protein, 1 aa, Artificial Sequence
  Synthetic
  REPEAT (1)..(1)
G

SEQ ID NO: 141 - protein, 5 aa, Artificial Sequence
  Synthetic
  REPEAT (1)..(5)
EAAAK

SEQ ID NO: 142 - protein, 24 aa, Artificial Sequence
  Synthetic
  REPEAT (1)..(4)
  REPEAT (20)..(24)
SGGSSGSETPGTSESATPESSGGS

SEQ ID NO: 143 - protein, 3 aa, Artificial Sequence
  Synthetic
  REPEAT (1)..(3)
GGS

SEQ ID NO: 144 - protein, 2 aa, Artificial Sequence
  Synthetic
  REPEAT (1)..(2)
XP

SEQ ID NO: 145 - protein, 24 aa, Artificial Sequence
  Synthetic
SGGSSGSETPGTSESATPESSGGS

SEQ ID NO: 146 - protein, 32 aa, Artificial Sequence; identical to SEQ ID NO: 136
  Synthetic

SEQ ID NO: 147 - protein, 104 aa, Artificial Sequence
  Synthetic
GGSGGSPGSPAGSPTSTEEGTSESATPESGPGTSTEPSEGSAPGSPAGSPTSTEEGTSTEPSEGSAPGTSTEPSEGSAPGTSESATPESGPGSEPATSGGSGGS

SEQ ID NO: 148 - protein, 24 aa, Artificial Sequence
  Synthetic
SGGSSGGSSGSETPGTSESATPES

SEQ ID NO: 149 - protein, 40 aa, Artificial Sequence
  Synthetic
SGGSSGGSSGSETPGTSESATPESSGGSSGGSSGGSSGGS

SEQ ID NO: 150 - protein, 64 aa, Artificial Sequence
  Synthetic
SGGSSGGSSGSETPGTSESATPESSGGSSGGSSGGSSGGSSGSETPGTSESATPESSGGSSGGS

SEQ ID NO: 151 - protein, 92 aa, Artificial Sequence
  Synthetic
PGSPAGSPTSTEEGTSESATPESGPGTSTEPSEGSAPGSPAGSPTSTEEGTSTEPSEGSAPGTSTEPSEGSAPGTSESATPESGPGSEPATS

SEQ ID NO: 152 - protein, 3 aa, Artificial Sequence
  Synthetic
  REPEAT (1)..(3)
GGS

SEQ ID NO: 153 - protein, 1368 aa, Artificial Sequence
  Synthetic
MDKKYSIGLAIGTNSVGWAVITDEYKVPSKKFKVLGNTDRHSIKKNLIGALLFDSGETAEATRLKRTARRRYTRRKNRICYLQEIFSNEMAKVDDSFFHRLEESFLVEEDKKHERHPIFGNIVDEVAYHEKYPTIYHLRKKLVDSTDKADLRLIYLALAHMIKFRGHFLIEGDLNPDNSDVDKLFIQLVQTYNQLFEENPINASGVDAKAILSARLSKSRRLENLIAQLPGEKKNGLFGNLIALSLGLTPNFKSNFDLAEDAKLQLSKDTYDDDLDNLLAQIGDQYADLFLAAKNLSDAILLSDILRVNTEITKAPLSASMIKRYDEHHQDLTLLKALVRQQLPEKYKEIFFDQSKNGYAGYIDGGASQEEFYKFIKPILEKMDGTEELLVKLNREDLLRKQRTFDNGSIPHQIHLGELHAILRRQEDFYPFLKDNREKIEKILTFRIPYYVGPLARGNSRFAWMTRKSEETITPWNFEEVVDKGASAQSFIERMTNFDKNLPNEKVLPKHSLLYEYFTVYNELTKVKYVTEGMRKPAFLSGEQKKAIVDLLFKTNRKVTVKQLKEDYFKKIECFDSVEISGVEDRFNASLGTYHDLLKIIKDKDFLDNEENEDILEDIVLTLTLFEDREMIEERLKTYAHLFDDKVMKQLKRRRYTGWGRLSRKLINGIRDKQSGKTILDFLKSDGFANRNFMQLIHDDSLTFKEDIQKAQVSGQGDSLHEHIANLAGSPAIKKGILQTVKVVDELVKVMGRHKPENIVIEMARENQTTQKGQKNSRERMKRIEEGIKELGSQILKEHPVENTQLQNEKLYLYYLQNGRDMYVDQELDINRLSDYDVDHIVPQSFLKDDSIDNKVLTRSDKNRGKSDNVPSEEVVKKMKNYWRQLLNAKLITQRKFDNLTKAERGGLSELDKAGFIKRQLVETRQITKHVAQILDSRMNTKYDENDKLIREVKVITLKSKLVSDFRKDFQFYKVREINNYHHAHDAYLNAVVGTALIKKYPKLESEFVYGDYKVYDVRKMIAKSEQEIGKATAKYFFYSNIMNFFKTEITLANGEIRKRPLIETNGETGEIVWDKGRDFATVRKVLSMPQVNIVKKTEVQTGGFSKESIRPKRNSDKLIARKKDWDPKKYGGFVSPTVAYSVLVVAKVEKGKSKKLKSVKELLGITIMERSSFEKNPIDFLEAKGYKEVKKDLIIKLPKYSLFELENGRKRMLASARFLQKGNELALPSKYVNFLYLASHYEKLKGSPEDNEQKQLFVEQHKHYLDEIIEQISEFSKRVILADANLDKVLSAYNKHRDKPIREQAENIIHLFTLTNLGAPRAFKYFDTTIDRKVYRSTKEVLDATLIHQSITGLYETRIDLSQLGGD

SEQ ID NO: 154 - protein, 1054 aa, Staphylococcus aureus
MGKRNYILGLAIGITSVGYGIIDYETRDVIDAGVRLFKEANVENNEGRRSKRGARRLKRRRRHRIQRVKKLLFDYNLLTDHSELSGINPYEARVKGLSQKLSEEEFSAALLHLAKRRGVHNVNEVEEDTGNELSTKEQISRNSKALEEKYVAELQLERLKKDGEVRGSINRFKTSDYVKEAKQLLKVQKAYHQLDQSFIDTYIDLLETRRTYYEGPGEGSPFGWKDIKEWYEMLMGHCTYFPEELRSVKYAYNADLYNALNDLNNLVITRDENEKLEYYEKFQIIENVFKQKKKPTLKQIAKEILVNEEDIKGYRVTSTGKPEFTNLKVYHDIKDITARKEIIENAELLDQIAKILTIYQSSEDIQEELTNLNSELTQEEIEQISNLKGYTGTHNLSLKAINLILDELWHTNDNQIAIFNRLKLVPKKVDLSQQKEIPTTLVDDFILSPVVKRSFIQSIKVINAIIKKYGLPNDIIIELAREKNSKDAQKMINEMQKRNRQTNERIEEIIRTTGKENAKYLIEKIKLHDMQEGKCLYSLEAIPLEDLLNNPFNYEVDHIIPRSVSFDNSFNNKVLVKQEENSKKGNRTPFQYLSSSDSKISYETFKKHILNLAKGKGRISKTKKEYLLEERDINRFSVQKDFINRNLVDTRYATRGLMNLLRSYFRVNNLDVKVKSINGGFTSFLRRKWKFKKERNKGYKHHAEDALIIANADFIFKEWKKLDKAKKVMENQMFEEKQAESMPEIETEQEYKEIFITPHQIKHIKDFKDYKYSHRVDKKPNRKLINDTLYSTRKDDKGNTLIVNNLNGLYDKDNDKLKKLINKSPEKLLMYHHDPQTYQKLKLIMEQYGDEKNPLYKYYEETGNYLTKYSKKDNGPVIKKIKYYGNKLNAHLDITDDYPNSRNKVVKLSLKPYRFDVYLDNGVYKFVTVKNLDVIKKENYYEVNSKCYEEAKKLKKISNQAEFIASFYKNDLIKINGELYRVIGVNNDLLNRIEVNMIDITYREYLENMNDKRPPHIIKTIASKTQSIKKYSTDILGNLYEVKSKKHPQIIKKG

SEQ ID NO: 155 - protein, 1368 aa, Artificial Sequence
  Synthetic
MDKKYSIGLAIGTNSVGWAVITDEYKVPSKKFKVLGNTDRHSIKKNLIGALLFDSGETAEATRLKRTARRRYTRRKNRICYLQEIFSNEMAKVDDSFFHRLEESFLVEEDKKHERHPIFGNIVDEVAYHEKYPTIYHLRKKLVDSTDKADLRLIYLALAHMIKFRGHFLIEGDLNPDNSDVDKLFIQLVQTYNQLFEENPINASGVDAKAILSARLSKSRRLENLIAQLPGEKKNGLFGNLIALSLGLTPNFKSNFDLAEDTKLQLSKDTYDDDLDNLLAQIGDQYADLFLAAKNLSDAILLSDILRVNTEITKAPLSASMIKLYDEHHQDLTLLKALVRQQLPEKYKEIFFDQSKNGYAGYIDGGASQEEFYKFIKPILEKMDGTEELLVKLNREDLLRKQRTFDNGIIPHQIHLGELHAILRRQEDFYPFLKDNREKIEKILTFRIPYYVGPLARGNSRFAWMTRKSEETITPWNFEKVVDKGASAQSFIERMTNFDKNLPNEKVLPKHSLLYEYFTVYNELTKVKYVTEGMRKPAFLSGDQKKAIVDLLFKTNRKVTVKQLKEDYFKKIECFDSVEISGVEDRFNASLGTYHDLLKIIKDKDFLDNEENEDILEDIVLTLTLFEDREMIEERLKTYAHLFDDKVMKQLKRRRYTGWGRLSRKLINGIRDKQSGKTILDFLKSDGFANRNFIQLIHDDSLTFKEDIQKAQVSGQGDSLHEHIANLAGSPAIKKGILQTVKVVDELVKVMGRHKPENIVIEMARENQTTQKGQKNSRERMKRIEEGIKELGSQILKEHPVENTQLQNEKLYLYYLQNGRDMYVDQELDINRLSDYDVDHIVPQSFLKDDSIDNKVLTRSDKNRGKSDNVPSEEVVKKMKNYWRQLLNAKLITQRKFDNLTKAERGGLSELDKAGFIKRQLVETRQITKHVAQILDSRMNTKYDENDKLIREVKVITLKSKLVSDFRKDFQFYKVREINNYHHAHDAYLNAVVGTALIKKYPKLESEFVYGDYKVYDVRKMIAKSEQEIGKATAKYFFYSNIMNFFKTEITLANGEIRKRPLIETNGETGEIVWDKGRDFATVRKVLSMPQVNIVKKTEVQTGGFSKESILPKRNSDKLIARKKDWDPKKYGGFDSPTVAYSVLVVAKVEKGKSKKLKSVKELLGITIMERSSFEKNPIDFLEAKGYKEVKKDLIIKLPKYSLFELENGRKRMLASAGVLQKGNELALPSKYVNFLYLASHYEKLKGSPEDNEQKQLFVEQHKHYLDEIIEQISEFSKRVILADANLDKVLSAYNKHRDKPIREQAENIIHLFTLTNLGAPAAFKYFDTTIDRKRYTSTKEVLDATLIHQSITGLYETRIDLSQLGGD

SEQ ID NO: 156 - protein, 1368 aa, Streptococcus pyogenes
MDKKYSIGLAIGTNSVGWAVITDEYKVPSKKFKVLGNTDRHSIKKNLIGALLFDSGETAEATRLKRTARRRYTRRKNRICYLQEIFSNEMAKVDDSFFHRLEESFLVEEDKKHERHPIFGNIVDEVAYHEKYPTIYHLRKKLVDSTDKADLRLIYLALAHMIKFRGHFLIEGDLNPDNSDVDKLFIQLVQTYNQLFEENPINASGVDAKAILSARLSKSRRLENLIAQLPGEKKNGLFGNLIALSLGLTPNFKSNFDLAEDAKLQLSKDTYDDDLDNLLAQIGDQYADLFLAAKNLSDAILLSDILRVNTEITKAPLSASMIKRYDEHHQDLTLLKALVRQQLPEKYKEIFFDQSKNGYAGYIDGGASQEEFYKFIKPILEKMDGTEELLVKLNREDLLRKQRTFDNGSIPHQIHLGELHAILRRQEDFYPFLKDNREKIEKILTFRIPYYVGPLARGNSRFAWMTRKSEETITPWNFEEVVDKGASAQSFIERMTNFDKNLPNEKVLPKHSLLYEYFTVYNELTKVKYVTEGMRKPAFLSGEQKKAIVDLLFKTNRKVTVKQLKEDYFKKIECFDSVEISGVEDRFNASLGTYHDLLKIIKDKDFLDNEENEDILEDIVLTLTLFEDREMIEERLKTYAHLFDDKVMKQLKRRRYTGWGRLSRKLINGIRDKQSGKTILDFLKSDGFANRNFMQLIHDDSLTFKEDIQKAQVSGQGDSLHEHIANLAGSPAIKKGILQTVKVVDELVKVMGRHKPENIVIEMARENQTTQKGQKNSRERMKRIEEGIKELGSQILKEHPVENTQLQNEKLYLYYLQNGRDMYVDQELDINRLSDYDVDHIVPQSFLKDDSIDNKVLTRSDKNRGKSDNVPSEEVVKKMKNYWRQLLNAKLITQRKFDNLTKAERGGLSELDKAGFIKRQLVETRQITKHVAQILDSRMNTKYDENDKLIREVKVITLKSKLVSDFRKDFQFYKVREINNYHHAHDAYLNAVVGTALIKKYPKLESEFVYGDYKVYDVRKMIAKSEQEIGKATAKYFFYSNIMNFFKTEITLANGEIRKRPLIETNGETGEIVWDKGRDFATVRKVLSMPQVNIVKKTEVQTGGFSKESILPKRNSDKLIARKKDWDPKKYGGFVSPTVAYSVLVVAKVEKGKSKKLKSVKELLGITIMERSSFEKNPIDFLEAKGYKEVKKDLIIKLPKYSLFELENGRKRMLASAGELQKGNELALPSKYVNFLYLASHYEKLKGSPEDNEQKQLFVEQHKHYLDEIIEQISEFSKRVILADANLDKVLSAYNKHRDKPIREQAENIIHLFTLTNLGAPAAFKYFDTTIDRKQYRSTKEVLDATLIHQSITGLYETRIDLSQLGGD

SEQ ID NO: 157 - protein, 1368 aa, Artificial Sequence
  Synthetic
MDKKYSIGLAIGTNSVGWAVITDEYKVPSKKFKVLGNTDRHSIKKNLIGALLFDSGETAEATRLKRTARRRYTRRKNRICYLQEIFSNEMAKVDDSFFHRLEESFLVEEDKKHERHPIFGNIVDEVAYHEKYPTIYHLRKKLVDSTDKADLRLIYLALAHMIKFRGHFLIEGDLNPDNSDVDKLFIQLVQTYNQLFEENPINASGVDAKAILSARLSKSRRLENLIAQLPGEKKNGLFGNLIALSLGLTPNFKSNFDLAEDAKLQLSKDTYDDDLDNLLAQIGDQYADLFLAAKNLSDAILLSDILRVNTEITKAPLSASMIKRYDEHHQDLTLLKALVRQQLPEKYKEIFFDQSKNGYAGYIDGGASQEEFYKFIKPILEKMDGTEELLVKLNREDLLRKQRTFDNGSIPHQIHLGELHAILRRQEDFYPFLKDNREKIEKILTFRIPYYVGPLARGNSRFAWMTRKSEETITPWNFEEVVDKGASAQSFIERMTNFDKNLPNEKVLPKHSLLYEYFTVYNELTKVKYVTEGMRKPAFLSGEQKKAIVDLLFKTNRKVTVKQLKEDYFKKIECFDSVEISGVEDRFNASLGTYHDLLKIIKDKDFLDNEENEDILEDIVLTLTLFEDREMIEERLKTYAHLFDDKVMKQLKRRRYTGWGRLSRKLINGIRDKQSGKTILDFLKSDGFANRNFMQLIHDDSLTFKEDIQKAQVSGQGDSLHEHIANLAGSPAIKKGILQTVKVVDELVKVMGRHKPENIVIEMARENQTTQKGQKNSRERMKRIEEGIKELGSQILKEHPVENTQLQNEKLYLYYLQNGRDMYVDQELDINRLSDYDVDHIVPQSFLKDDSIDNKVLTRSDKNRGKSDNVPSEEVVKKMKNYWRQLLNAKLITQRKFDNLTKAERGGLSELDKAGFIKRQLVETRQITKHVAQILDSRMNTKYDENDKLIREVKVITLKSKLVSDFRKDFQFYKVREINNYHHAHDAYLNAVVGTALIKKYPKLESEFVYGDYKVYDVRKMIAKSEQEIGKATAKYFFYSNIMNFFKTEITLANGEIRKRPLIETNGETGEIVWDKGRDFATVRKVLSMPQVNIVKKTEVQTGGFSKESILPKRNSDKLIARKKDWDPKKYGGFESPTVAYSVLVVAKVEKGKSKKLKSVKELLGITIMERSSFEKNPIDFLEAKGYKEVKKDLIIKLPKYSLFELENGRKRMLASAGELQKGNELALPSKYVNFLYLASHYEKLKGSPEDNEQKQLFVEQHKHYLDEIIEQISEFSKRVILADANLDKVLSAYNKHRDKPIREQAENIIHLFTLTNLGAPAAFKYFDTTIDRKQYRSTKEVLDATLIHQSITGLYETRIDLSQLGGD

SEQ ID NO: 158 - protein, 19 aa, Artificial Sequence
  Synthetic
NLSKRPAAIKKAGQAKKKK

SEQ ID NO: 159 - protein, 11 aa, Artificial Sequence
  Synthetic
RQRRNELKRSF

SEQ ID NO: 160 - protein, 38 aa, Artificial Sequence
  Synthetic
NQSSNFGPMKGGNFGGRSSGPYGGGGQYFAKPRNQGGY

SEQ ID NO: 161 - protein, 16 aa, Artificial Sequence
  Synthetic
  misc_feature (3)..(12): Xaa can be any naturally occurring amino acid
KRXXXXXXXXXXKKKL

SEQ ID NO: 162 - DNA, 20 bp, Artificial Sequence
  Synthetic
agggttcagtggagagtctg

SEQ ID NO: 163 - DNA, 127 bp, Artificial Sequence
  Synthetic
tcaacagaactgaatgagcactcgtggcttgagcccaaggagctggaaaatcttgaggtggagcttccagagtttgtgttaatgactacagactctccactgaacccttggagttacaggctctgac

SEQ ID NO: 164 - DNA, 21 bp, Artificial Sequence
  Synthetic
gctcagtactgaggcactgtg

SEQ ID NO: 165 - DNA, 21 bp, Artificial Sequence
  Synthetic
gctcggtactgaggcactgtg

SEQ ID NO: 166 - DNA, 21 bp, Artificial Sequence
  Synthetic
gctcggtgctgaggcactgtg

SEQ ID NO: 167 - DNA, 21 bp, Artificial Sequence
  Synthetic
gctcagtactgaggcactgtg

SEQ ID NO: 168 - DNA, 21 bp, Artificial Sequence
  Synthetic
gctcagtgctgaggcactgtg

SEQ ID NO: 169 - DNA, 2 bp, Artificial Sequence
  Synthetic
tg

SEQ ID NO: 170 - DNA, 76 bp, Artificial Sequence
  Synthetic
gttttagagctagaaatagcaagttaaaataaggctagtccgttatcaacttgaaaaagtggcaccgagtcggtgc

SEQ ID NO: 171 - protein, 1387 aa, Artificial Sequence
  Synthetic
DYKVYDVRKMIAKSEQEIGKATAKYFFYSNIMNFFKTEITLANGEIRKRPLIETNGETGEIVWDKGRDFATVRKVLSMPQVNIVKKTEVQTGGFSKESILPKRNSDKLIARKKDWDPKKYGGFDSPTVAYSVLVVAKVEKGKSKKLKSVKELLGITIMERSSFEKNPIDFLEAKGYKEVKKDLIIKLPKYSLFELENGRKRMLASAGELQKGNELALPSKYVNFLYLASHYEKLKGSPEDNEQKQLFVEQHKHYLDEIIEQISEFSKRVILADANLDKVLSAYNKHRDKPIREQAENIIHLFTLTNLGAPAAFKYFDTTIDRKRYTSTKEVLDATLIHQSITGLYETRIDLSQLGGDGGSGGSGGSGGSGGSGGSGGDKKYSIGLAIGTNSVGWAVITDEYKVPSKKFKVLGNTDRHSIKKNLIGALLFDSGETAEATRLKRTARRRYTRRKNRICYLQEIFSNEMAKVDDSFFHRLEESFLVEEDKKHERHPIFGNIVDEVAYHEKYPTIYHLRKKLVDSTDKADLRLIYLALAHMIKFRGHFLIEGDLNPDNSDVDKLFIQLVQTYNQLFEENPINASGVDAKAILSARLSKSRRLENLIAQLPGEKKNGLFGNLIALSLGLTPNFKSNFDLAEDAKLQLSKDTYDDDLDNLLAQIGDQYADLFLAAKNLSDAILLSDILRVNTEITKAPLSASMIKRYDEHHQDLTLLKALVRQQLPEKYKEIFFDQSKNGYAGYIDGGASQEEFYKFIKPILEKMDGTEELLVKLNREDLLRKQRTFDNGSIPHQIHLGELHAILRRQEDFYPFLKDNREKIEKILTFRIPYYVGPLARGNSRFAWMTRKSEETITPWNFEEVVDKGASAQSFIERMTNFDKNLPNEKVLPKHSLLYEYFTVYNELTKVKYVTEGMRKPAFLSGEQKKAIVDLLFKTNRKVTVKQLKEDYFKKIECFDSVEISGVEDRFNASLGTYHDLLKIIKDKDFLDNEENEDILEDIVLTLTLFEDREMIEERLKTYAHLFDDKVMKQLKRRRYTGWGRLSRKLINGIRDKQSGKTILDFLKSDGFANRNFMQLIHDDSLTFKEDIQKAQVSGQGDSLHEHIANLAGSPAIKKGILQTVKVVDELVKVMGRHKPENIVIEMARENQTTQKGQKNSRERMKRIEEGIKELGSQILKEHPVENTQLQNEKLYLYYLQNGRDMYVDQELDINRLSDYDVDHIVPQSFLKDDSIDNKVLTRSDKNRGKSDNVPSEEVVKKMKNYWRQLLNAKLITQRKFDNLTKAERGGLSELDKAGFIKRQLVETRQITKHVAQILDSRMNTKYDENDKLIREVKVITLKSKLVSDFRKDFQFYKVREINNYHHAHDAYLNAVVGTALIKKYPKLESEFVYG

SEQ ID NO: 172 - protein, 1388 aa, Artificial Sequence
  Synthetic
EIGKATAKYFFYSNIMNFFKTEITLANGEIRKRPLIETNGETGEIVWDKGRDFATVRKVLSMPQVNIVKKTEVQTGGFSKESILPKRNSDKLIARKKDWDPKKYGGFDSPTVAYSVLVVAKVEKGKSKKLKSVKELLGITIMERSSFEKNPIDFLEAKGYKEVKKDLIIKLPKYSLFELENGRKRMLASAGELQKGNELALPSKYVNFLYLASHYEKLKGSPEDNEQKQLFVEQHKHYLDEIIEQISEFSKRVILADANLDKVLSAYNKHRDKPIREQAENIIHLFTLTNLGAPAAFKYFDTTIDRKRYTSTKEVLDATLIHQSITGLYETRIDLSQLGGDGGSGGSGGSGGSGGSGGSGGMDKKYSIGLAIGTNSVGWAVITDEYKVPSKKFKVLGNTDRHSIKKNLIGALLFDSGETAEATRLKRTARRRYTRRKNRICYLQEIFSNEMAKVDDSFFHRLEESFLVEEDKKHERHPIFGNIVDEVAYHEKYPTIYHLRKKLVDSTDKADLRLIYLALAHMIKFRGHFLIEGDLNPDNSDVDKLFIQLVQTYNQLFEENPINASGVDAKAILSARLSKSRRLENLIAQLPGEKKNGLFGNLIALSLGLTPNFKSNFDLAEDAKLQLSKDTYDDDLDNLLAQIGDQYADLFLAAKNLSDAILLSDILRVNTEITKAPLSASMIKRYDEHHQDLTLLKALVRQQLPEKYKEIFFDQSKNGYAGYIDGGASQEEFYKFIKPILEKMDGTEELLVKLNREDLLRKQRTFDNGSIPHQIHLGELHAILRRQEDFYPFLKDNREKIEKILTFRIPYYVGPLARGNSRFAWMTRKSEETITPWNFEEVVDKGASAQSFIERMTNFDKNLPNEKVLPKHSLLYEYFTVYNELTKVKYVTEGMRKPAFLSGEQKKAIVDLLFKTNRKVTVKQLKEDYFKKIECFDSVEISGVEDRFNASLGTYHDLLKIIKDKDFLDNEENEDILEDIVLTLTLFEDREMIEERLKTYAHLFDDKVMKQLKRRRYTGWGRLSRKLINGIRDKQSGKTILDFLKSDGFANRNFMQLIHDDSLTFKEDIQKAQVSGQGDSLHEHIANLAGSPAIKKGILQTVKVVDELVKVMGRHKPENIVIEMARENQTTQKGQKNSRERMKRIEEGIKELGSQILKEHPVENTQLQNEKLYLYYLQNGRDMYVDQELDINRLSDYDVDHIVPQSFLKDDSIDNKVLTRSDKNRGKSDNVPSEEVVKKMKNYWRQLLNAKLITQRKFDNLTKAERGGLSELDKAGFIKRQLVETRQITKHVAQILDSRMNTKYDENDKLIREVKVITLKSKLVSDFRKDFQFYKVREINNYHHAHDAYLNAVVGTALIKKYPKLESEFVYGDYKVYDVRKMIAKSEQ

SEQ ID NO: 173 - protein, 1387 aa, Artificial Sequence
  Synthetic
NIMNFFKTEITLANGEIRKRPLIETNGETGEIVWDKGRDFATVRKVLSMPQVNIVKKTEVQTGGFSKESILPKRNSDKLIARKKDWDPKKYGGFDSPTVAYSVLVVAKVEKGKSKKLKSVKELLGITIMERSSFEKNPIDFLEAKGYKEVKKDLIIKLPKYSLFELENGRKRMLASAGELQKGNELALPSKYVNFLYLASHYEKLKGSPEDNEQKQLFVEQHKHYLDEIIEQISEFSKRVILADANLDKVLSAYNKHRDKPIREQAENIIHLFTLTNLGAPAAFKYFDTTIDRKRYTSTKEVLDATLIHQSITGLYETRIDLSQLGGDGGSGGSGGSGGSGGSGGSGGDKKYSIGLAIGTNSVGWAVITDEYKVPSKKFKVLGNTDRHSIKKNLIGALLFDSGETAEATRLKRTARRRYTRRKNRICYLQEIFSNEMAKVDDSFFHRLEESFLVEEDKKHERHPIFGNIVDEVAYHEKYPTIYHLRKKLVDSTDKADLRLIYLALAHMIKFRGHFLIEGDLNPDNSDVDKLFIQLVQTYNQLFEENPINASGVDAKAILSARLSKSRRLENLIAQLPGEKKNGLFGNLIALSLGLTPNFKSNFDLAEDAKLQLSKDTYDDDLDNLLAQIGDQYADLFLAAKNLSDAILLSDILRVNTEITKAPLSASMIKRYDEHHQDLTLLKALVRQQLPEKYKEIFFDQSKNGYAGYIDGGASQEEFYKFIKPILEKMDGTEELLVKLNREDLLRKQRTFDNGSIPHQIHLGELHAILRRQEDFYPFLKDNREKIEKILTFRIPYYVGPLARGNSRFAWMTRKSEETITPWNFEEVVDKGASAQSFIERMTNFDKNLPNEKVLPKHSLLYEYFTVYNELTKVKYVTEGMRKPAFLSGEQKKAIVDLLFKTNRKVTVKQLKEDYFKKIECFDSVEISGVEDRFNASLGTYHDLLKIIKDKDFLDNEENEDILEDIVLTLTLFEDREMIEERLKTYAHLFDDKVMKQLKRRRYTGWGRLSRKLINGIRDKQSGKTILDFLKSDGFANRNFMQLIHDDSLTFKEDIQKAQVSGQGDSLHEHIANLAGSPAIKKGILQTVKVVDELVKVMGRHKPENIVIEMARENQTTQKGQKNSRERMKRIEEGIKELGSQILKEHPVENTQLQNEKLYLYYLQNGRDMYVDQELDINRLSDYDVDHIVPQSFLKDDSIDNKVLTRSDKNRGKSDNVPSEEVVKKMKNYWRQLLNAKLITQRKFDNLTKAERGGLSELDKAGFIKRQLVETRQITKHVAQILDSRMNTKYDENDKLIREVKVITLKSKLVSDFRKDFQFYKVREINNYHHAHDAYLNAVVGTALIKKYPKLESEFVYGDYKVYDVRKMIAKSEQEIGKATAKYFFYS

SEQ ID NO: 174 - protein, 1388 aa, Artificial Sequence
  Synthetic
PEDNEQKQLFVEQHKHYLDEIIEQISEFSKRVILADANLDKVLSAYNKHRDKPIREQAENIIHLFTLTNLGAPAAFKYFDTTIDRKRYTSTKEVLDATLIHQSITGLYETRIDLSQLGGDGGSGGSGGSGGSGGSGGSGGMDKKYSIGLAIGTNSVGWAVITDEYKVPSKKFKVLGNTDRHSIKKNLIGALLFDSGETAEATRLKRTARRRYTRRKNRICYLQEIFSNEMAKVDDSFFHRLEESFLVEEDKKHERHPIFGNIVDEVAYHEKYPTIYHLRKKLVDSTDKADLRLIYLALAHMIKFRGHFLIEGDLNPDNSDVDKLFIQLVQTYNQLFEENPINASGVDAKAILSARLSKSRRLENLIAQLPGEKKNGLFGNLIALSLGLTPNFKSNFDLAEDAKLQLSKDTYDDDLDNLLAQIGDQYADLFLAAKNLSDAILLSDILRVNTEITKAPLSASMIKRYDEHHQDLTLLKALVRQQLPEKYKEIFFDQSKNGYAGYIDGGASQEEFYKFIKPILEKMDGTEELLVKLNREDLLRKQRTFDNGSIPHQIHLGELHAILRRQEDFYPFLKDNREKIEKILTFRIPYYVGPLARGNSRFAWMTRKSEETITPWNFEEVVDKGASAQSFIERMTNFDKNLPNEKVLPKHSLLYEYFTVYNELTKVKYVTEGMRKPAFLSGEQKKAIVDLLFKTNRKVTVKQLKEDYFKKIECFDSVEISGVEDRFNASLGTYHDLLKIIKDKDFLDNEENEDILEDIVLTLTLFEDREMIEERLKTYAHLFDDKVMKQLKRRRYTGWGRLSRKLINGIRDKQSGKTILDFLKSDGFANRNFMQLIHDDSLTFKEDIQKAQVSGQGDSLHEHIANLAGSPAIKKGILQTVKVVDELVKVMGRHKPENIVIEMARENQTTQKGQKNSRERMKRIEEGIKELGSQILKEHPVENTQLQNEKLYLYYLQNGRDMYVDQELDINRLSDYDVDHIVPQSFLKDDSIDNKVLTRSDKNRGKSDNVPSEEVVKKMKNYWRQLLNAKLITQRKFDNLTKAERGGLSELDKAGFIKRQLVETRQITKHVAQILDSRMNTKYDENDKLIREVKVITLKSKLVSDFRKDFQFYKVREINNYHHAHDAYLNAVVGTALIKKYPKLESEFVYGDYKVYDVRKMIAKSEQEIGKATAKYFFYSNIMNFFKTEITLANGEIRKRPLIETNGETGEIVWDKGRDFATVRKVLSMPQVNIVKKTEVQTGGFSKESILPKRNSDKLIARKKDWDPKKYGGFDSPTVAYSVLVVAKVEKGKSKKLKSVKELLGITIMERSSFEKNPIDFLEAKGYKEVKKDLIIKLPKYSLFELENGRKRMLASAGELQKGNELALPSKYVNFLYLASHYEKLKGS

SEQ ID NO: 175 - protein, 1387 aa, Artificial Sequence
  Synthetic
KPIREQAENIIHLFTLTNLGAPAAFKYFDTTIDRKRYTSTKEVLDATLIHQSITGLYETRIDLSQLGGDGGSGGSGGSGGSGGSGGSGGDKKYSIGLAIGTNSVGWAVITDEYKVPSKKFKVLGNTDRHSIKKNLIGALLFDSGETAEATRLKRTARRRYTRRKNRICYLQEIFSNEMAKVDDSFFHRLEESFLVEEDKKHERHPIFGNIVDEVAYHEKYPTIYHLRKKLVDSTDKADLRLIYLALAHMIKFRGHFLIEGDLNPDNSDVDKLFIQLVQTYNQLFEENPINASGVDAKAILSARLSKSRRLENLIAQLPGEKKNGLFGNLIALSLGLTPNFKSNFDLAEDAKLQLSKDTYDDDLDNLLAQIGDQYADLFLAAKNLSDAILLSDILRVNTEITKAPLSASMIKRYDEHHQDLTLLKALVRQQLPEKYKEIFFDQSKNGYAGYIDGGASQEEFYKFIKPILEKMDGTEELLVKLNREDLLRKQRTFDNGSIPHQIHLGELHAILRRQEDFYPFLKDNREKIEKILTFRIPYYVGPLARGNSRFAWMTRKSEETITPWNFEEVVDKGASAQSFIERMTNFDKNLPNEKVLPKHSLLYEYFTVYNELTKVKYVTEGMRKPAFLSGEQKKAIVDLLFKTNRKVTVKQLKEDYFKKIECFDSVEISGVEDRFNASLGTYHDLLKIIKDKDFLDNEENEDILEDIVLTLTLFEDREMIEERLKTYAHLFDDKVMKQLKRRRYTGWGRLSRKLINGIRDKQSGKTILDFLKSDGFANRNFMQLIHDDSLTFKEDIQKAQVSGQGDSLHEHIANLAGSPAIKKGILQTVKVVDELVKVMGRHKPENIVIEMARENQTTQKGQKNSRERMKRIEEGIKELGSQILKEHPVENTQLQNEKLYLYYLQNGRDMYVDQELDINRLSDYDVDHIVPQSFLKDDSIDNKVLTRSDKNRGKSDNVPSEEVVKKMKNYWRQLLNAKLITQRKFDNLTKAERGGLSELDKAGFIKRQLVETRQITKHVAQILDSRMNTKYDENDKLIREVKVITLKSKLVSDFRKDFQFYKVREINNYHHAHDAYLNAVVGTALIKKYPKLESEFVYGDYKVYDVRKMIAKSEQEIGKATAKYFFYSNIMNFFKTEITLANGEIRKRPLIETNGETGEIVWDKGRDFATVRKVLSMPQVNIVKKTEVQTGGFSKESILPKRNSDKLIARKKDWDPKKYGGFDSPTVAYSVLVVAKVEKGKSKKLKSVKELLGITIMERSSFEKNPIDFLEAKGYKEVKKDLIIKLPKYSLFELENGRKRMLASAGELQKGNELALPSKYVNFLYLASHYEKLKGSPEDNEQKQLFVEQHKHYLDEIIEQISEFSKRVILADANLDKVLSAYNKHRD

SEQ ID NO: 176 - protein, 357 aa, Artificial Sequence
  Synthetic
DYKVYDVRKMIAKSEQEIGKATAKYFFYSNIMNFFKTEITLANGEIRKRPLIETNGETGEIVWDKGRDFATVRKVLSMPQVNIVKKTEVQTGGFSKESILPKRNSDKLIARKKDWDPKKYGGFDSPTVAYSVLVVAKVEKGKSKKLKSVKELLGITIMERSSFEKNPIDFLEAKGYKEVKKDLIIKLPKYSLFELENGRKRMLASAGELQKGNELALPSKYVNFLYLASHYEKLKGSPEDNEQKQLFVEQHKHYLDEIIEQISEFSKRVILADANLDKVLSAYNKHRDKPIREQAENIIHLFTLTNLGAPAAFKYFDTTIDRKRYTSTKEVLDATLIHQSITGLYETRIDLSQLGGD

SEQ ID NO: 177 - protein, 341 aa, Artificial Sequence
  Synthetic
EIGKATAKYFFYSNIMNFFKTEITLANGEIRKRPLIETNGETGEIVWDKGRDFATVRKVLSMPQVNIVKKTEVQTGGFSKESILPKRNSDKLIARKKDWDPKKYGGFDSPTVAYSVLVVAKVEKGKSKKLKSVKELLGITIMERSSFEKNPIDFLEAKGYKEVKKDLIIKLPKYSLFELENGRKRMLASAGELQKGNELALPSKYVNFLYLASHYEKLKGSPEDNEQKQLFVEQHKHYLDEIIEQISEFSKRVILADANLDKVLSAYNKHRDKPIREQAENIIHLFTLTNLGAPAAFKYFDTTIDRKRYTSTKEVLDATLIHQSITGLYETRIDLSQLGGD

SEQ ID NO: 178 - protein, 328 aa, Artificial Sequence
  Synthetic
NIMNFFKTEITLANGEIRKRPLIETNGETGEIVWDKGRDFATVRKVLSMPQVNIVKKTEVQTGGFSKESILPKRNSDKLIARKKDWDPKKYGGFDSPTVAYSVLVVAKVEKGKSKKLKSVKELLGITIMERSSFEKNPIDFLEAKGYKEVKKDLIIKLPKYSLFELENGRKRMLASAGELQKGNELALPSKYVNFLYLASHYEKLKGSPEDNEQKQLFVEQHKHYLDEIIEQISEFSKRVILADANLDKVLSAYNKHRDKPIREQAENIIHLFTLTNLGAPAAFKYFDTTIDRKRYTSTKEVLDATLIHQSITGLYETRIDLSQLGGD

SEQ ID NO: 179 - protein, 120 aa, Artificial Sequence
  Synthetic
PEDNEQKQLFVEQHKHYLDEIIEQISEFSKRVILADANLDKVLSAYNKHRDKPIREQAENIIHLFTLTNLGAPAAFKYFDTTIDRKRYTSTKEVLDATLIHQSITGLYETRIDLSQLGGD

SEQ ID NO: 180 - protein, 69 aa, Artificial Sequence
  Synthetic
KPIREQAENIIHLFTLTNLGAPAAFKYFDTTIDRKRYTSTKEVLDATLIHQSITGLYETRIDLSQLGGD

SEQ ID NO: 181 - protein, 1387 aa, Artificial Sequence
  Synthetic
NIMNFFKTEITLANGEIRKRPLIETNGETGEIVWDKGRDFATVRKVLSMPQVNIVKKTEVQTGGFSKESIRPKRNSDKLIARKKDWDPKKYGGFVSPTVAYSVLVVAKVEKGKSKKLKSVKELLGITIMERSSFEKNPIDFLEAKGYKEVKKDLIIKLPKYSLFELENGRKRMLASARFLQKGNELALPSKYVNFLYLASHYEKLKGSPEDNEQKQLFVEQHKHYLDEIIEQISEFSKRVILADANLDKVLSAYNKHRDKPIREQAENIIHLFTLTNLGAPRAFKYFDTTIDRKVYRSTKEVLDATLIHQSITGLYETRIDLSQLGGDGGSGGSGGSGGSGGSGGSGGDKKYSIGLAIGTNSVGWAVITDEYKVPSKKFKVLGNTDRHSIKKNLIGALLFDSGETAEATRLKRTARRRYTRRKNRICYLQEIFSNEMAKVDDSFFHRLEESFLVEEDKKHERHPIFGNIVDEVAYHEKYPTIYHLRKKLVDSTDKADLRLIYLALAHMIKFRGHFLIEGDLNPDNSDVDKLFIQLVQTYNQLFEENPINASGVDAKAILSARLSKSRRLENLIAQLPGEKKNGLFGNLIALSLGLTPNFKSNFDLAEDAKLQLSKDTYDDDLDNLLAQIGDQYADLFLAAKNLSDAILLSDILRVNTEITKAPLSASMIKRYDEHHQDLTLLKALVRQQLPEKYKEIFFDQSKNGYAGYIDGGASQEEFYKFIKPILEKMDGTEELLVKLNREDLLRKQRTFDNGSIPHQIHLGELHAILRRQEDFYPFLKDNREKIEKILTFRIPYYVGPLARGNSRFAWMTRKSEETITPWNFEEVVDKGASAQSFIERMTNFDKNLPNEKVLPKHSLLYEYFTVYNELTKVKYVTEGMRKPAFLSGEQKKAIVDLLFKTNRKVTVKQLKEDYFKKIECFDSVEISGVEDRFNASLGTYHDLLKIIKDKDFLDNEENEDILEDIVLTLTLFEDREMIEERLKTYAHLFDDKVMKQLKRRRYTGWGRLSRKLINGIRDKQSGKTILDFLKSDGFANRNFMQLIHDDSLTFKEDIQKAQVSGQGDSLHEHIANLAGSPAIKKGILQTVKVVDELVKVMGRHKPENIVIEMARENQTTQKGQKNSRERMKRIEEGIKELGSQILKEHPVENTQLQNEKLYLYYLQNGRDMYVDQELDINRLSDYDVDHIVPQSFLKDDSIDNKVLTRSDKNRGKSDNVPSEEVVKKMKNYWRQLLNAKLITQRKFDNLTKAERGGLSELDKAGFIKRQLVETRQITKHVAQILDSRMNTKYDENDKLIREVKVITLKSKLVSDFRKDFQFYKVREINNYHHAHDAYLNAVVGTALIKKYPKLESEFVYGDYKVYDVRKMIAKSEQEIGKATAKYFFYS

SEQ ID NO: 182 - protein, 1387 aa, Artificial Sequence; identical to SEQ ID NO: 181
  Synthetic

SEQ ID NO: 183 - DNA, 51 bp, Artificial Sequence; identical to SEQ ID NO: 1
  Synthetic

SEQ ID NO: 184 - DNA, 51 bp, Artificial Sequence; identical to SEQ ID NO: 2
  Synthetic

SEQ ID NO: 185 - DNA, 51 bp, Artificial Sequence; identical to SEQ ID NO: 3
  Synthetic

SEQ ID NO: 186 - DNA, 50 bp, Artificial Sequence
  Synthetic
atttacgtctcagaagctcatatccaaagcaaaagacaagcaggaacatc

SEQ ID NO: 187 - DNA, 51 bp, Artificial Sequence; identical to SEQ ID NO: 5
  Synthetic

SEQ ID NO: 188 - DNA, 51 bp, Artificial Sequence; identical to SEQ ID NO: 6
  Synthetic

SEQ ID NO: 189 - DNA, 51 bp, Artificial Sequence; identical to SEQ ID NO: 7
  Synthetic

SEQ ID NO: 190 - DNA, 51 bp, Artificial Sequence; identical to SEQ ID NO: 8
  Synthetic

SEQ ID NO: 191 - DNA, 50 bp, Artificial Sequence
  Synthetic
tcttgaagatacaatrgtctaaaccggagaaaacctatacaatcaaatgg

SEQ ID NO: 192 - DNA, 51 bp, Artificial Sequence; identical to SEQ ID NO: 10
  Synthetic

SEQ ID NO: 193 - DNA, 50 bp, Artificial Sequence
  Synthetic
cggaggaactacaggtccaggttctctaaagtmaataaatccagaaagtc

SEQ ID NO: 194 - DNA, 23 bp, Artificial Sequence
  Synthetic
caaaaggaatatttggcataagg

SEQ ID NO: 195 - DNA, 23 bp, Artificial Sequence
  Synthetic
aaacaggaaaatttagtataagg

SEQ ID NO: 196 - DNA, 23 bp, Artificial Sequence
  Synthetic
taacaggaatactttgtatatgg

SEQ ID NO: 197 - DNA, 23 bp, Artificial Sequence
  Synthetic
taacaggaatatatgttatatgg

SEQ ID NO: 198 - RNA, 20 nt, Artificial Sequence
  Synthetic
ccugcagagauaauccaaaa

SEQ ID NO: 199 - RNA, 20 nt, Artificial Sequence
  Synthetic
cucuuaccuugggaaaggag

SEQ ID NO: 200 - RNA, 20 nt, Artificial Sequence
  Synthetic
uuccuucccgcaucagggaa

SEQ ID NO: 201 - RNA, 20 nt, Artificial Sequence
  Synthetic
auccaaagcaaaagacaagc

SEQ ID NO: 202 - RNA, 20 nt, Artificial Sequence
  Synthetic
auuggugauucccgcugugg

SEQ ID NO: 203 - RNA, 20 nt, Artificial Sequence
  Synthetic
uaacaggaauauuugguaua

SEQ ID NO: 204 - RNA, 20 nt, Artificial Sequence
  Synthetic
uagacgccucugcucccagg

SEQ ID NO: 205 - RNA, 20 nt, Artificial Sequence
  Synthetic
augagucuacuauuacucuc

SEQ ID NO: 206 - RNA, 20 nt, Artificial Sequence
  Synthetic
cuuaaaccggagaaaaccua

SEQ ID NO: 207 - RNA, 20 nt, Artificial Sequence
  Synthetic
gggcagcgugagugcaaaaa

SEQ ID NO: 208 - RNA, 20 nt, Artificial Sequence
  Synthetic
cucuaaaguaaaauaaaucc

SEQ ID NO: 209 - RNA, 20 nt, Artificial Sequence
  Synthetic
guagucauuaacacaaacuc

SEQ ID NO: 210 - RNA, 20 nt, Artificial Sequence
  Synthetic
guagucauuaacacaaacuc

SEQ ID NO: 211 - RNA, 20 nt, Artificial Sequence
  Synthetic
gcuucagagaaauuuaaauc

SEQ ID NO: 212 - RNA, 20 nt, Artificial Sequence
  Synthetic
ugauucacagaugcuucgag

SEQ ID NO: 213 - RNA, 20 nt, Artificial Sequence
  Synthetic
gcucaguacugaggcacugu

SEQ ID NO: 214 - RNA, 20 nt, Artificial Sequence
  Synthetic
uuccccguaagaaaauuaac

SEQ ID NO: 215 - RNA, 20 nt, Artificial Sequence
  Synthetic
uucaaaagcuggccuuaaug

SEQ ID NO: 216 - RNA, 20 nt, Artificial Sequence
  Synthetic
agaccucaugacucagucaa

SEQ ID NO: 217 - RNA, 20 nt, Artificial Sequence
  Synthetic
ccauucaugcaggcuacaag

SEQ ID NO: 218 - RNA, 20 nt, Artificial Sequence
  Synthetic
ugucagaagaaugcaagauu

SEQ ID NO: 219 - RNA, 20 nt, Artificial Sequence
  Synthetic
aaccaugacacucuauuauc

SEQ ID NO: 220 - RNA, 20 nt, Artificial Sequence
  Synthetic
uugucagaaaaaguaauccu

SEQ ID NO: 221 - RNA, 20 nt, Artificial Sequence
  Synthetic
cuacccugucuuagcauuac

SEQ ID NO: 222 - RNA, 20 nt, Artificial Sequence
  Synthetic
acuaauuacaccuucuuccu

SEQ ID NO: 223 - RNA, 20 nt, Artificial Sequence
  Synthetic
aacucaacuuuccucagaug

SEQ ID NO: 224 - RNA, 20 nt, Artificial Sequence
  Synthetic
aacuucacgggagcccuccc

SEQ ID NO: 225 - RNA, 20 nt, Artificial Sequence
  Synthetic
uucgguaguugcaugaagga

SEQ ID NO: 226 - RNA, 20 nt, Artificial Sequence
  Synthetic
agcaggucaugagggucuug

SEQ ID NO: 227 - RNA, 20 nt, Artificial Sequence
  Synthetic
ucuagccauggccaucauga

SEQ ID NO: 228 - RNA, 20 nt, Artificial Sequence
  Synthetic
guacagcauucugccacagc

SEQ ID NO: 229 - RNA, 20 nt, Artificial Sequence
  Synthetic
ccacucaugcaggcuuggag

SEQ ID NO: 230 - RNA, 20 nt, Artificial Sequence
  Synthetic
aauucauauuucauaccuuc

SEQ ID NO: 231 - RNA, 20 nt, Artificial Sequence
  Synthetic
cggcaucuuaacacuuccuu

SEQ ID NO: 232 - RNA, 20 nt, Artificial Sequence
  Synthetic
caggcacuagccacugauug

SEQ ID NO: 233 - DNA, 51 bp, Artificial Sequence; identical to SEQ ID NO: 12
  Synthetic

SEQ ID NO: 234 - DNA, 51 bp, Artificial Sequence; identical to SEQ ID NO: 13
  Synthetic

SEQ ID NO: 235 - DNA, 49 bp, Artificial Sequence
  Synthetic
  misc_feature (43)..(43): n is a, c, g, or t
tcacatccaacatcattaaagctcagagaaatrraaatccaanttgcaa

SEQ ID NO: 236 - DNA, 50 bp, Artificial Sequence
  Synthetic
aaaataattcgctatgaagtgattcacagatgcttcgagggaaaagctgg

SEQ ID NO: 237 - DNA, 51 bp, Artificial Sequence; identical to SEQ ID NO: 16
  Synthetic

SEQ ID NO: 238 - DNA, 50 bp, Artificial Sequence
  Synthetic
atcaaacctcaggcacttttgttcaaaagctggccttaatgcctggtaag

SEQ ID NO: 239 - DNA, 51 bp, Artificial Sequence; identical to SEQ ID NO: 18
  Synthetic

SEQ ID NO: 240 - DNA, 51 bp, Artificial Sequence; identical to SEQ ID NO: 19
  Synthetic

SEQ ID NO: 241 - DNA, 51 bp, Artificial Sequence
  Synthetic
catgttctctggcagggcctccattatccaggcagatrrrgacacactagc

SEQ ID NO: 242 - DNA, 51 bp, Artificial Sequence; identical to SEQ ID NO: 21
  Synthetic

SEQ ID NO: 243 - DNA, 50 bp, Artificial Sequence
  Synthetic
agaggatgggcttcaggattcaaccatgacactctatatcagctgtgtct

SEQ ID NO: 244 - DNA, 49 bp, Artificial Sequence
  Synthetic
gccgaaggatctgcaccaatgtcagaaaaagtaatccttgcacagctca

SEQ ID NO: 245 - DNA, 50 bp, Artificial Sequence
  Synthetic
tcaacattgggctrgcagatgcactaccctgtctagcattacagacagtc

SEQ ID NO: 246 - DNA, 48 bp, Artificial Sequence
  Synthetic
attctttctacctggttgacactaattacacctcttccttgacgatta

SEQ ID NO: 247 - DNA, 51 bp, Artificial Sequence; identical to SEQ ID NO: 26
  Synthetic

SEQ ID NO: 248 - DNA, 51 bp, Artificial Sequence; identical to SEQ ID NO: 27
  Synthetic

SEQ ID NO: 249 - DNA, 51 bp, Artificial Sequence; identical to SEQ ID NO: 28
  Synthetic

SEQ ID NO: 250 - DNA, 51 bp, Artificial Sequence; identical to SEQ ID NO: 29
  Synthetic

SEQ ID NO: 251 - DNA, 51 bp, Artificial Sequence; identical to SEQ ID NO: 30
  Synthetic

SEQ ID NO: 252 - DNA, 51 bp, Artificial Sequence; identical to SEQ ID NO: 31
  Synthetic

SEQ ID NO: 253 - DNA, 51 bp, Artificial Sequence; identical to SEQ ID NO: 32
  Synthetic

SEQ ID NO: 254 - DNA, 51 bp, Artificial Sequence; identical to SEQ ID NO: 33
  Synthetic

SEQ ID NO: 255 - DNA, 51 bp, Artificial Sequence; identical to SEQ ID NO: 34
  Synthetic

SEQ ID NO: 256 - DNA, 50 bp, Artificial Sequence
  Synthetic
tgacgattaggcacacacaggcactagccactgatgggtcacaaatggtc

SEQ ID NO: 257 - DNA, 23 bp, Artificial Sequence
  Synthetic
gtagtcaagaacacaaactctgg

SEQ ID NO: 258 - DNA, 23 bp, Artificial Sequence
  Synthetic
ttattcataaacacaaactctgg

SEQ ID NO: 259 - DNA, 23 bp, Artificial Sequence
  Synthetic
gtggtcatctacacaaactctgg

SEQ ID NO: 260 - DNA, 23 bp, Artificial Sequence
  Synthetic
gaagtcaataaaacaaactctgg

SEQ ID NO: 261 - DNA, 23 bp, Artificial Sequence
  Synthetic
gaagttagaaacacaaactctgg

SEQ ID NO: 262 - DNA, 23 bp, Artificial Sequence
  Synthetic
ttactcattaacataaactcagg

SEQ ID NO: 263 - DNA, 23 bp, Artificial Sequence
  Synthetic
gaagttataaaaacaaactcggg

SEQ ID NO: 264 - DNA, 23 bp, Artificial Sequence
  Synthetic
gtaatcattagcataaactcagg

SEQ ID NO: 265 - DNA, 23 bp, Artificial Sequence
  Synthetic
gaaatcataaacacaaaatctgg

SEQ ID NO: 266 - DNA, 23 bp, Artificial Sequence
  Synthetic
gttatcattaacataaattcagg

SEQ ID NO: 267 - DNA, 19 bp, Artificial Sequence
  Synthetic
gccctggaaacaaaaccaa

SEQ ID NO: 268 - DNA, 21 bp, Artificial Sequence
  Synthetic
ttccagggcttagatgccaat

SEQ ID NO: 269 - DNA, 17 bp, Artificial Sequence
  Synthetic
ctcttaccttgggaaag

SEQ ID NO: 270 - DNA, 17 bp, Artificial Sequence
  Synthetic
ttccttcccgcatcagg

SEQ ID NO: 271 - DNA, 17 bp, Artificial Sequence
  Synthetic
ttccccgtaagaaaatt

SEQ ID NO: 272 - DNA, 17 bp, Artificial Sequence
  Synthetic
atccaaagcaaaagaca

SEQ ID NO: 273 - DNA, 17 bp, Artificial Sequence
  Synthetic
attggtgattcccgctg

SEQ ID NO: 274 - DNA, 17 bp, Artificial Sequence
  Synthetic
taacaggaatatttggt

SEQ ID NO: 275 - DNA, 17 bp, Artificial Sequence
  Synthetic
tagacgcctctgctccc

SEQ ID NO: 276 - DNA, 17 bp, Artificial Sequence
  Synthetic
atgagtctactattact

SEQ ID NO: 277 - DNA, 17 bp, Artificial Sequence
  Synthetic
cttaaaccggagaaaac

SEQ ID NO: 278 - protein, 167 aa, Artificial Sequence
  Synthetic
MSEVEFSHEYWMRHALTLAKRAWDEREVPVGAVLVHNNRVIGEGWNRPIGRHDPTAHAEIMALRQGGLVMQNYRLIDATLYVTLEPCVMCAGAMIHSRIGRVVFGARDAKTGAAGSLMDVLHHPGMNHRVEITEGILADECAALLSDFFRMRRQEIKAQKKAQSSTD

SEQ ID NO: 279 - protein, 178 aa, Escherichia coli
MRRAFITGVFFLSEVEFSHEYWMRHALTLAKRAWDEREVPVGAVLVHNNRVIGEGWNRPIGRHDPTAHAEIMALRQGGLVMQNYRLIDATLYVTLEPCVMCAGAMIHSRIGRVVFGARDAKTGAAGSLMDVLHHPGMNHRVEITEGILADECAALLSDFFRMRRQEIKAQKKAQSSTD

SEQ ID NO: 280 - protein, 160 aa, Staphylococcus aureus
MGSHMTNDIYFMTLAIEEAKKAAQLGEVPIGAIITKDDEVIARAHNLRETLQQPTAHAEHIAIERAAKVLGSWRLEGCTLYVTLEPCVMCAGTIVMSRIPRVVYGADDPKGGCSGSLMNLLQQSNFNHRAIVDKGVLKEACSTLLTTFFKNLRANKKSTN

SEQ ID NO: 281 - protein, 161 aa, Bacillus subtilis
MTQDELYMKEAIKEAKKAEEKGEVPIGAVLVINGEIIARAHNLRETEQRSIAHAEMLVIDEACKALGTWRLEGATLYVTLEPCPMCAGAVVLSRVEKVVFGAFDPKGGCSGTLMNLLQEERFNHQAEVVSGVLEEECGGMLSAFFRELRKKKKAARKNLSE

SEQ ID NO: 282 - protein, 183 aa, Salmonella typhimurium
MPPAFITGVTSLSDVELDHEYWMRHALTLAKRAWDEREVPVGAVLVHNHRVIGEGWNRPIGRHDPTAHAEIMALRQGGLVLQNYRLLDTTLYVTLEPCVMCAGAMVHSRIGRVVFGARDAKTGAAGSLIDVLHHPGMNHRVEIIEGVLRDECATLLSDFFRMRRQEIKALKKADRAEGAGPAV

SEQ ID NO: 283 - protein, 164 aa, Shewanella putrefaciens
MDEYWMQVAMQMAEKAEAAGEVPVGAVLVKDGQQIATGYNLSISQHDPTAHAEILCLRSAGKKLENYRLLDATLYITLEPCAMCAGAMVHSRIARVVYGARDEKTGAAGTVVNLLQHPAFNHQVEVTSGVLAEACSAQLSRFFKRRRDEKKALKLAQRAQQGIE

SEQ ID NO: 284 - protein, 173 aa, Haemophilus influenzae
MDAAKVRSEFDEKMMRYALELADKAEALGEIPVGAVLVDDARNIIGEGWNLSIVQSDPTAHAEIIALRNGAKNIQNYRLLNSTLYVTLEPCTMCAGAILHSRIKRLVFGASDYKTGAIGSRFHFFDDYKMNHTLEITSGVLAEECSQKLSTFFQKRREEKKIEKALLKSLSDK

SEQ ID NO: 285 - protein, 161 aa, Caulobacter crescentus
MRTDESEDQDHRMMRLALDAARAAAEAGETPVGAVILDPSTGEVIATAGNGPIAAHDPTAHAEIAAMRAAAAKLGNYRLTDLTLVVTLEPCAMCAGAISHARIGRVVFGADDPKGGAVVHGPKFFAQPTCHWRPEVTGGVLADESADLLRGFFRARRKAKI

SEQ ID NO: 286 - protein, 179 aa, Geobacter sulfurreducens
MSSLKKTPIRDDAYWMGKAIREAAKAAARDEVPIGAVIVRDGAVIGRGHNLREGSNDPSAHAEMIAIRQAARRSANWRLTGATLYVTLEPCLMCMGAIILARLERVVFGCYDPKGGAAGSLYDLSADPRLNHQVRLSPGVCQEECGTMLSDFFRDLRRRKKAKATPALFIDERKVPPEP

SEQ ID NO: 287 - protein, 171 aa, Streptococcus pyogenes
MPYSLEEQTYFMQEALKEAEKSLQKAEIPIGCVIVKDGEIIGRGHNAREESNQAIMHAEIMAINEANAHEGNWRLLDTTLFVTIEPCVMCSGAIGLARIPHVIYGASNQKFGGADSLYQILTDERLNHRVQVERGLLAADCANIMQTFFRQGRERKKIAKHLIKEQSDPFD

SEQ ID NO: 288 - protein, 166 aa, Artificial Sequence
  Synthetic
SEVEFSHEYWMRHALTLAKRALDEREVPVGAVLVLNNRVIGEGWNRAIGLHDPTAHAEIMALRQGGLVMQNYRLIDATLYVTFEPCVMCAGAMIHSRIGRVVFGWRNAKTGAAGSLMDVLHYPGMNHRVEITEGILADECAALLCYFFRMPRQVFNAQKKAQSSTD

SEQ ID NO: 289 - protein, 166 aa, Escherichia coli
SEVEFSHEYWMRHALTLAKRARDEREVPVGAVLVLNNRVIGEGWNRAIGLHDPTAHAEIMALRQGGLVMQNYRLIDATLYVTFEPCVMCAGAMIHSRIGRVVFGWRNAKTGAAGSLMDVLHYPGMNHRVEITEGILADECAALLCYFFRMPRQVFNAQKKAQSSTD

SEQ ID NO: 290 - protein, 166 aa, Escherichia coli
SEVEFSHEYWMRHALTLAKRARDEREVPVGAVLVLNNRVIGEGWNRAIGLHDPTAHAEIMALRQGGLVMQNYRLIDATLYVTFEPCVMCAGAMIHSRIGRVVFGVRNSKRGAAGSLMNVLNYPGMNHRVEITEGILADECAALLCDFYRMPRQVFNAQKKAQSSIN

SEQ ID NO: 291 - protein, 166 aa, Escherichia coli
SEVEFSHEYWMRHALTLAKRARDEREVPVGAVLVLNNRVIGEGWNRAIGLHDPTAHAEIMALRQGGLVMQNYRLIDATLYVTFEPCVMCAGAMIHSRIGRVVFGWRNSKRGAAGSLMNVLNYPGMNHRVEITEGILADECAALLCDFYRMPRQVFNAQKKAQSSIN

SEQ ID NO: 292 - protein, 198 aa, Homo sapiens [sequence omitted]

SEQ ID NO: 293 - protein, 198 aa, Mus musculus
MDSLLMKQKKFLYHFKNVRWAKGRHETYLCYVVKRRDSATSCSLDFGHLRNKSGCHVELLFLRYISDWDLDPGRCYRVTWFTSWSPCYDCARHVAEFLRWNPNLSLRIFTARLYFCEDRKAEPEGLRRLHRAGVQIGIMTFKDYFYCWNTFVENRERTFKAWEGLHENSVRLTRQLRRILLPLYEVDDLRDAFRMLGF

SEQ ID NO: 294 - protein, 198 aa, Canis lupus familiaris
MDSLLMKQRKFLYHFKNVRWAKGRHETYLCYVVKRRDSATSFSLDFGHLRNKSGCHVELLFLRYISDWDLDPGRCYRVTWFTSWSPCYDCARHVADFLRGYPNLSLRIFAARLYFCEDRKAEPEGLRRLHRAGVQIAIMTFKDYFYCWNTFVENREKTFKAWEGLHENSVRLSRQLRRILLPLYEVDDLRDAFRTLGL

SEQ ID NO: 295 - protein, 199 aa, Bos taurus
MDSLLKKQRQFLYQFKNVRWAKGRHETYLCYVVKRRDSPTSFSLDFGHLRNKAGCHVELLFLRYISDWDLDPGRCYRVTWFTSWSPCYDCARHVADFLRGYPNLSLRIFTARLYFCDKERKAEPEGLRRLHRAGVQIAIMTFKDYFYCWNTFVENHERTFKAWEGLHENSVRLSRQLRRILLPLYEVDDLRDAFRTLGL

SEQ ID NO: 296 - protein, 239 aa, Rattus
MAVGSKPKAALVGPHWERERIWCFLCSTGLGTQQTGQTSRWLRPAATQDPVSPPRSLLMKQRKFLYHFKNVRWAKGRHETYLCYVVKRRDSATSFSLDFGYLRNKSGCHVELLFLRYISDWDLDPGRCYRVTWFTSWSPCYDCARHVADFLRGNPNLSLRIFTARLTGWGALPAGLMSPARPSDYFYCWNTFVENHERTFKAWEGLHENSVRLSRRLRRILLPLYEVDDLRDAFRTLGL

SEQ ID NO: 297 - protein, 429 aa, Mus musculus
MGPFCLGCSHRKCYSPIRNLISQETFKFHFKNLGYAKGRKDTFLCYEVTRKDCDSPVSLHHGVFKNKDNIHAEICFLYWFHDKVLKVLSPREEFKITWYMSWSPCFECAEQIVRFLATHHNLSLDIFSSRLYNVQDPETQQNLCRLVQEGAQVAAMDLYEFKKCWKKFVDNGGRRFRPWKRLLTNFRYQDSKLQEILRPCYIPVPSSSSSTLSNICLTKGLPETRFCVEGRRMDPLSEEEFYSQFYNQRVKHLCYYHRMKPYLCYQLEQFNGQAPLKGCLLSEKGKQHAEILFLDKIRSMELSQVTITCYLTWSPCPNCAWQLAAFKRDRPDLILHIYTSRLYFHWKRPFQKGLCSLWQSGILVDVMDLPQFTDCWTNFVNPKRPFWPWKGLEIISRRTQRRLRRIKESWGLQDLVNDFGNLQLGPPMS

SEQ ID NO: 298 - protein, 429 aa, Rattus
MGPFCLGCSHRKCYSPIRNLISQETFKFHFKNLRYAIDRKDTFLCYEVTRKDCDSPVSLHHGVFKNKDNIHAEICFLYWFHDKVLKVLSPREEFKITWYMSWSPCFECAEQVLRFLATHHNLSLDIFSSRLYNIRDPENQQNLCRLVQEGAQVAAMDLYEFKKCWKKFVDNGGRRFRPWKKLLTNFRYQDSKLQEILRPCYIPVPSSSSSTLSNICLTKGLPETRFCVERRRVHLLSEEEFYSQFYNQRVKHLCYYHGVKPYLCYQLEQFNGQAPLKGCLLSEKGKQHAEILFLDKIRSMELSQVIITCYLTWSPCPNCAWQLAAFKRDRPDLILHIYTSRLYFHWKRPFQKGLCSLWQSGILVDVMDLPQFTDCWTNFVNPKRPFWPWKGLEIISRRTQRRLHRIKESWGLQDLVNDFGNLQLGPPMS

SEQ ID NO: 299 - protein, 370 aa, Macaca mulatta
MVEPMDPRTFVSNFNNRPILSGLNTVWLCCEVKTKDPSGPPLDAKIFQGKVYSKAKYHPEMRFLRWFHKWRQLHHDQEYKVTWYVSWSPCTRCANSVATFLAKDPKVTLTIFVARLYYFWKPDYQQALRILCQKRGGPHATMKIMNYNEFQDCWNKFVDGRGKPFKPRNNLPKHYTLLQATLGELLRHLMDPGTFTSNFNNKPWVSGQHETYLCYKVERLHNDTWVPLNQHRGFLRNQAPNIHGFPKGRHAELCFLDLIPFWKLDGQQYRVTCFTSWSPCFSCAQEMAKFISNNEHVSLCIFAARIYDDQGRYQEGLRALHRDGAKIAMMNYSEFEYCWDTFVDRQGRPFQPWDGLDEHSQALSGRLRAI

SEQ ID NO: 300 - protein, 384 aa, Pan troglodytes
MKPHFRNPVERMYQDTFSDNFYNRPILSHRNTVWLCYEVKTKGPSRPPLDAKIFRGQVYSKLKYHPEMRFFHWFSKWRKLHRDQEYEVTWYISWSPCTKCTRDVATFLAEDPKVTLTIFVARLYYFWDPDYQEALRSLCQKRDGPRATMKIMNYDEFQHCWSKFVYSQRELFEPWNNLPKYYILLHIMLGEILRHSMDPPTFTSNFNNELWVRGRHETYLCYEVERLHNDTWVLLNQRRGFLCNQAPHKHGFLEGRHAELCFLDVIPFWKLDLHQDYRVTCFTSWSPCFSCAQEMAKFISNNKHVSLCIFAARIYDDQGRCQEGLRTLAKAGAKISIMTYSEFKHCWDTFVDHQGCPFQPWDGLEEHSQALSGRLRAILQNQGN

SEQ ID NO: 301 - protein, 377 aa, Chlorocebus sabaeus
MNPQIRNMVEQMEPDIFVYYFNNRPILSGRNTVWLCYEVKTKDPSGPPLDANIFQGKLYPEAKDHPEMKFLHWFRKWRQLHRDQEYEVTWYVSWSPCTRCANSVATFLAEDPKVTLTIFVARLYYFWKPDYQQALRILCQERGGPHATMKIMNYNEFQHCWNEFVDGQGKPFKPRKNLPKHYTLLHATLGELLRHVMDPGTFTSNFNNKPWVSGQRETYLCYKVERSHNDTWVLLNQHRGFLRNQAPDRHGFPKGRHAELCFLDLIPFWKLDDQQYRVTCFTSWSPCFSCAQKMAKFISNNKHVSLCIFAARIYDDQGRCQEGLRTLHRDGAKIAVMNYSEFEYCWDTFVDRQGRPFQPWDGLDEHSQALSGRLRAI

SEQ ID NO: 302 - protein, 384 aa, Homo sapiens
MKPHFRNTVERMYRDTFSYNFYNRPILSRRNTVWLCYEVKTKGPSRPPLDAKIFRGQVYSELKYHPEMRFFHWFSKWRKLHRDQEYEVTWYISWSPCTKCTRDMATFLAEDPKVTLTIFVARLYYFWDPDYQEALRSLCQKRDGPRATMKIMNYDEFQHCWSKFVYSQRELFEPWNNLPKYYILLHIMLGEILRHSMDPPTFTFNFNNEPWVRGRHETYLCYEVERMHNDTWVLLNQRRGFLCNQAPHKHGFLEGRHAELCFLDVIPFWKLDLDQDYRVTCFTSWSPCFSCAQEMAKFISKNKHVSLCIFTARIYDDQGRCQEGLRTLAEAGAKISIMTYSEFKHCWDTFVDHQGCPFQPWDGLDEHSQDLSGRLRAILQNQEN

SEQ ID NO: 303 - protein, 373 aa, Homo sapiens
MKPHFRNTVERMYRDTFSYNFYNRPILSRRNTVWLCYEVKTKGPSRPRLDAKIFRGQVYSQPEHHAEMCFLSWFCGNQLPAYKCFQITWFVSWTPCPDCVAKLAEFLAEHPNVTLTISAARLYYYWERDYRRALCRLSQAGARVKIMDDEEFAYCWENFVYSEGQPFMPWYKFDDNYAFLHRTLKEILRNPMEAMYPHIFYFHFKNLRKAYGRNESWLCFTMEVVKHHSPVSWKRGVFRNQVDPETHCHAERCFLSWFCDDILSPNTNYEVTWYTSWSPCPECAGEVAEFLARHSNVNLTIFTARLYYFWDTDYQEGLRSLSQEGASVEIMGYKDFKYCWENFVYNDDEPFKPWKGLKYNFLFLDSKLQEILE

SEQ ID NO: 304 - protein, 382 aa, Homo sapiens
MNPQIRNPMERMYRDTFYDNFENEPILYGRSYTWLCYEVKIKRGRSNLLWDTGVFRGQVYFKPQYHAEMCFLSWFCGNQLPAYKCFQITWFVSWTPCPDCVAKLAEFLSEHPNVTLTISAARLYYYWERDYRRALCRLSQAGARVTIMDYEEFAYCWENFVYNEGQQFMPWYKFDENYAFLHRTLKEILRYLMDPDTFTFNFNNDPLVLRRRQTYLCYEVERLDNGTWVLMDQHMGFLCNEAKNLLCGFYGRHAELRFLDLVPSLQLDPAQIYRVTWFISWSPCFSWGCAGEVRAFLQENTHVRLRIFAARIYDYDPLYKEALQMLRDAGAQVSIMTYDEFEYCWDTFVYRQGCPFQPWDGLEEHSQALSGRLRAILQNQGN

SEQ ID NO: 305 - protein, 396 aa, Rattus
MQPQGLGPNAGMGPVCLGCSHRRPYSPIRNPLKKLYQQTFYFHFKNVRYAWGRKNNFLCYEVNGMDCALPVPLRQGVFRKQGHIHAELCFIYWFHDKVLRVLSPMEEFKVTWYMSWSPCSKCAEQVARFLAAHRNLSLAIFSSRLYYYLRNPNYQQKLCRLIQEGVHVAAMDLPEFKKCWNKFVDNDGQPFRPWMRLRINFSFYDCKLQEIFSRMNLLREDVFYLQFNNSHRVKPVQNRYYRRKSYLCYQLERANGQEPLKGYLLYKKGEQHVEILFLEKMRSMELSQVRITCYLTWSPCPNCARQLAAFKKDHPDLILRIYTSRLYFYWRKKFQKGLCTLWRSGIHVDVMDLPQFADCWTNFVNPQRPFRPWNELEKNSWRIQRRLRRIKESWGL

SEQ ID NO: 306 - protein, 227 aa, Bos taurus
DGWEVAFRSGTVLKAGVLGVSMTEGWAGSGHPGQGACVWTPGTRNTMNLLREVLFKQQFGNQPRVPAPYYRRKTYLCYQLKQRNDLTLDRGCFRNKKQRHAEIRFIDKINSLDLNPSQSYKIICYITWSPCPNCANELVNFITRNNHLKLEIFASRLYFHWIKSFKMGLQDLQNAGISVAVMTHTEFEDCWEQFVDNQSRPFQPWDKLEQYSASIRRRLQRILTAPI

SEQ ID NO: 307 - protein, 490 aa, Pan troglodytes
MNPQIRNPMEWMYQRTFYYNFENEPILYGRSYTWLCYEVKIRRGHSNLLWDTGVFRGQMYSQPEHHAEMCFLSWFCGNQLSAYKCFQITWFVSWTPCPDCVAKLAKFLAEHPNVTLTISAARLYYYWERDYRRALCRLSQAGARVKIMDDEEFAYCWENFVYNEGQPFMPWYKFDDNYAFLHRTLKEIIRHLMDPDTFTFNFNNDPLVLRRHQTYLCYEVERLDNGTWVLMDQHMGFLCNEAKNLLCGFYGRHAELRFLDLVPSLQLDPAQIYRVTWFISWSPCFSWGCAGQVRAFLQENTHVRLRIFAARIYDYDPLYKEALQMLRDAGAQVSIMTYDEFEYCWDTFVYRQGCPFQPWDGLEEHSQALSGRLRAILQVRASSLCMVPHRPPPPPQSPGPCLPLCSEPPLGSLLPTGRPAPSLPFLLTASFSFPPPASLPPLPSLSLSPGHLPVPSFHSLTSCSIQPPCSSRIRETEGWASVSKEGRDLG

SEQ ID NO: 308 - protein, 190 aa, Homo sapiens
MNPQIRNPMKAMYPGTFYFQFKNLWEANDRNETWLCFTVEGIKRRSVVSWKTGVFRNQVDSETHCHAERCFLSWFCDDILSPNTKYQVTWYTSWSPCPDCAGEVAEFLARHSNVNLTIFTARLYYFQYPCYQEGLRSLSQEGVAVEIMDYEDFKYCWENFVYNDNEPFKPWKGLKTNFRLLKRRLRESLQ

SEQ ID NO: 309 - protein, 190 aa, Gorilla beringei
MNPQIRNPMKAMYPGTFYFQFKNLWEANDRNETWLCFTVEGIKRRSVVSWKTGVFRNQVDSETHCHAERCFLSWFCDDILSPNTNYQVTWYTSWSPCPECAGEVAEFLARHSNVNLTIFTARLYYFQDTDYQEGLRSLSQEGVAVKIMDYKDFKYCWENFVYNDDEPFKPWKGLKYNFRFLKRRLQEILE

SEQ ID NO: 310 - protein, 199 aa, Homo sapiens
MEASPASGPRHLMDPHIFTSNFNNGIGRHKTYLCYEVERLDNGTSVKMDQHRGFLHNQAKNLLCGFYGRHAELRFLDLVPSLQLDPAQIYRVTWFISWSPCFSWGCAGEVRAFLQENTHVRLRIFAARIYDYDPLYKEALQMLRDAGAQVSIMTYDEFKHCWDTFVDHQGCPFQPWDGLDEHSQALSGRLRAILQNQGN

SEQ ID NO: 311 - protein, 202 aa, Macaca mulatta
MDGSPASRPRHLMDPNTFTFNFNNDLSVRGRHQTYLCYEVERLDNGTWVPMDERRGFLCNKAKNVPCGDYGCHVELRFLCEVPSWQLDPAQTYRVTWFISWSPCFRRGCAGQVRVFLQENKHVRLRIFAARIYDYDPLYQEALRTLRDAGAQVSIMTYEEFKHCWDTFVDRQGRPFQPWDGLDEHSQALSGRLRAILQNQGN

SEQ ID NO: 312 - protein, 185 aa, Bos taurus
MDEYTFTENFNNQGWPSKTYLCYEMERLDGDATIPLDEYKGFVRNKGLDQPEKPCHAELYFLGKIHSWNLDRNQHYRLTCFISWSPCYDCAQKLTTFLKENHHISLHILASRIYTHNRFGCHQSGLCELQAAGARITIMTFEDFKHCWETFVDHKGKPFQPWEGLNVKSQALCTELQAILKTQQN

SEQ ID NO: 313 - protein, 200 aa, Homo sapiens
MALLTAETFRLQFNNKRRLRRPYYPRKALLCYQLTPQNGSTPTRGYFENKKKCHAEICFINEIKSMGLDETQCYQVTCYLTWSPCSSCAWELVDFIKAHDHLNLGIFASRLYYHWCKPQQKGLRLLCGSQVPVEVMGFPKFADCWENFVDHEKPLSFNPYKMLEELDKNSRAIKRRLERIKIPGVRAQGRYMDILCDAEV

SEQ ID NO: 314 - protein, 210 aa, Macaca mulatta
MALLTAKTFSLQFNNKRRVNKPYYPRKALLCYQLTPQNGSTPTRGHLKNKKKDHAEIRFINKIKSMGLDETQCYQVTCYLTWSPCPSCAGELVDFIKAHRHLNLRIFASRLYYHWRPNYQEGLLLLCGSQVPVEVMGLPEFTDCWENFVDHKEPPSFNPSEKLEELDKNSQAIKRRLERIKSRSVDVLENGLRSLQLGPVTPSSSIRNSR

SEQ ID NO: 315 - protein, 386 aa, Homo sapiens
MNPQIRNPMERMYRDTFYDNFENEPILYGRSYTWLCYEVKIKRGRSNLLWDTGVFRGPVLPKRQSNHRQEVYFRFENHAEMCFLSWFCGNRLPANRRFQITWFVSWNPCLPCVVKVTKFLAEHPNVTLTISAARLYYYRDRDWRWVLLRLHKAGARVKIMDYEDFAYCWENFVCNEGQPFMPWYKFDDNYASLHRTLKEILRNPMEAMYPHIFYFHFKNLLKACGRNESWLCFTMEVTKHHSAVFRKRGVFRNQVDPETHCHAERCFLSWFCDDILSPNTNYEVTWYTSWSPCPECAGEVAEFLARHSNVNLTIFTARLCYFWDTDYQEGLCSLSQEGASVKIMGYKDFVSCWKNFVYSDDEPFKPWKGLQTNFRLLKRRLREILQ

SEQ ID NO: 316 - protein, 236 aa, Homo sapiens
MTSEKGPSTGDPTLRRRIEPWEFDVFYDPRELRKEACLLYEIKWGMSRKIWRSSGKNTTNHVEVNFIKKFTSERDFHPSMSCSITWFLSWSPCWECSQAIREFLSRHPGVTLVIYVARLFWHMDQQNRQGLRDLVNSGVTIQIMRASEYYHCWRNFVNYPPGDEAHWPQYPPLWMMLYALELHCIILSLPPCLKISRRWQNHLTFFRLHLQNCHYQTIPPHILLATGLIHPSVAWR

SEQ ID NO: 317 - protein, 229 aa, Mus musculus
MSSETGPVAVDPTLRRRIEPHEFEVFFDPRELRKETCLLYEINWGGRHSVWRHTSQNTSNHVEVNFLEKFTTERYFRPNTRCSITWFLSWSPCGECSRAITEFLSRHPYVTLFIYIARLYHHTDQRNRQGLRDLISSGVTIQIMTEQEYCYCWRNFVNYPPSNEAYWPRYPHLWVKLYVLELYCIILGLPPCLKILRRKQPQLTFFTITLQTCHYQRIPPHLLWATGLK

SEQ ID NO: 318 - protein, 229 aa, Rattus [sequence omitted]

SEQ ID NO: 319 - protein, 224 aa, Homo sapiens
MAQKEEAAVATEAASQNGEDLENLDDPEKLKELIELPPFEIVTGERLPANFFKFQFRNVEYSSGRNKTFLCYVVEAQGKGGQVQASRGYLEDEHAAAHAEEAFFNTILPAFDPALRYNVTWYVSSSPCAACADRIIKTLSKTKNLRLLILVGRLFMWEEPEIQAALKKLKEAGCKLRIMKPQDFEYVWQNFVEQEEGESKAFQPWEDIQENFLYYEEKLADILK

SEQ ID NO: 320 - protein, 224 aa, Mus musculus
MAQKEEAAEAAAPASQNGDDLENLEDPEKLKELIDLPPFEIVTGVRLPVNFFKFQFRNVEYSSGRNKTFLCYVVEVQSKGGQAQATQGYLEDEHAGAHAEEAFFNTILPAFDPALKYNVTWYVSSSPCAACADRILKTLSKTKNLRLLILVSRLFMWEEPEVQAALKKLKEAGCKLRIMKPQDFEYIWQNFVEQEEGESKAFEPWEDIQENFLYYEEKLADILK

SEQ ID NO: 321 - protein, 224 aa, Rattus
MAQKEEAAEAAAPASQNGDDLENLEDPEKLKELIDLPPFEIVTGVRLPVNFFKFQFRNVEYSSGRNKTFLCYVVEAQSKGGQVQATQGYLEDEHAGAHAEEAFFNTILPAFDPALKYNVTWYVSSSPCAACADRILKTLSKTKNLRLLILVSRLFMWEEPEVQAALKKLKEAGCKLRIMKPQDFEYLWQNFVEQEEGESKAFEPWEDIQENFLYYEEKLADILK

SEQ ID NO: 322 - protein, 224 aa, Bos taurus
MAQKEEAAAAAEPASQNGEEVENLEDPEKLKELIELPPFEIVTGERLPAHYFKFQFRNVEYSSGRNKTFLCYVVEAQSKGGQVQASRGYLEDEHATNHAEEAFFNSIMPTFDPALRYMVTWYVSSSPCAACADRIVKTLNKTKNLRLLILVGRLFMWEEPEIQAALRKLKEAGCRLRIMKPQDFEYIWQNFVEQEEGESKAFEPWEDIQENFLYYEEKLADILK

SEQ ID NO: 323 - protein, 208 aa, Petromyzon marinus
MTDAEYVRIHEKLDIYTFKKQFFNNKKSVSHRCYVLFELKRRGERRACFWGYAVNKPQSGTERGIHAEIFSIRKVEEYLRDNPGQFTINWYSSWSPCADCAEKILEWYNQELRGNGHTLKIWACKLYYEKNARNQIGLWNLRDNGVGLNVMVSEHYQCCRKIFIQSSHNQLNENRWLEKTLKRAEKRRSELSIMIQVKILHTTKSPAV

SEQ ID NO: 324 - protein, 384 aa, Homo sapiens
MKPHFRNTVERMYRDTFSYNFYNRPILSRRNTVWLCYEVKTKGPSRPPLDAKIFRGQVYSELKYHPEMRFFHWFSKWRKLHRDQEYEVTWYISWSPCTKCTRDMATFLAEDPKVTLTIFVARLYYFWDPDYQEALRSLCQKRDGPRATMKIMNYDEFQHCWSKFVYSQRELFEPWNNLPKYYILLHIMLGEILRHSMDPPTFTFNFNNEPWVRGRHETYLCYEVERMHNDTWVLLNQRRGFLCNQAPHKHGFLEGRHAELCFLDVIPFWKLDLDQDYRVTCFTSWSPCFSCAQEMAKFISKNKHVSLCIFTARIYRRQGRCQEGLRTLAEAGAKISIMTYSEFKHCWDTFVDHQGCPFQPWDGLDEHSQDLSGRLRAILQNQEN

SEQ ID NO: 325 - protein, 184 aa, Homo sapiens
MDPPTFTFNFNNEPWVRGRHETYLCYEVERMHNDTWVLLNQRRGFLCNQAPHKHGFLEGRHAELCFLDVIPFWKLDLDQDYRVTCFTSWSPCFSCAQEMAKFISKNKHVSLCIFTARIYDDQGRCQEGLRTLAEAGAKISIMTYSEFKHCWDTFVDHQGCPFQPWDGLDEHSQDLSGRLRAILQ

SEQ ID NO: 326 - protein, 184 aa, Homo sapiens
MDPPTFTFNFNNEPWVRGRHETYLCYEVERMHNDTWVLLNQRRGFLCNQAPHKHGFLEGRHAELCFLDVIPFWKLDLDQDYRVTCFTSWSPCFSCAQEMAKFISKNKHVSLCIFTARIYRRQGRCQEGLRTLAEAGAKISIMTYSEFKHCWDTFVDHQGCPFQPWDGLDEHSQDLSGRLRAILQ

SEQ ID NO: 327 - protein, 162 aa, Artificial Sequence
  Synthetic
MFERNYDPRELRKETYLLYEIKWGKSGKLWRHWCQNNRTQHAEVYFLENIFNARRFNPSTHCSITWYLSWSPCAECSQKIVDFLKEHPNVNLEIYVARLYYHEDERNRQGLRDLVNSGVTIRIMDLPDYNYCWKTFVSDQGGDEDYWPGHFAPWIKQYSLKL

SEQ ID NO: 328 - protein, 162 aa, Artificial Sequence
  Synthetic
MFERNYDPRELRKETYLLYEIKWGKSGKLWRHWCQNNRTQHAEVYFLENIFNARRFNPSTHCSITWYLSWSPCAECSQKIVDFLKEHPNVNLEIYVARLYYPENERNRQGLRDLVNSGVTIRIMDLPDYNYCWKTFVSDQGGDEDYWPGHFAPWIKQYSLKL

SEQ ID NO: 329 - RNA, 20 nt, Artificial Sequence
  Synthetic
uccauuauccaggcagauuu

SEQ ID NO: 330 - protein, 229 aa, Artificial Sequence
  Synthetic
MSSKTGPVAVDPTLRRRIEPHEFEVFFDPRELRKETCLLYEINWGGRHSIWRHTSQNTNKHVEVNFIEKFTTERYFCPNTRCSITWFLSWSPCGECSRAITEFLSRYPNVTLFIYIARLYHLANPRNRQGLRDLISSGVTIQIMTEQESGYCWHNFVNYSPSNESHWPRYPHLWVRLYVLELYCIILGLPPCLNILRRKQSQLTSFTIALQSCHYQRLPPHILWATGLK

SEQ ID NO: 331 - skipped

SEQ ID NO: 332 - protein, 208 aa, Artificial Sequence
  Synthetic
MTDAEYVRIHEKLDIYTFKKQFSNNKKSVSHRCYVLFELKRRGERRACFWGYAVNKPQSGTERGIHAEIFSIRKVEEYLRDNPGQFTINWYSSWSPCADCAEKILEWYNQELRGNGHTLKIWVCKLYYEKNARNQIGLWNLRDNGVGLNVMVSEHYQCCRKIFIQSSHNQLNENRWLEKTLKRAEKRRSELSIMFQVKILHTTKSPAV

SEQ ID NO: 333 - protein, 229 aa, Artificial Sequence
  Synthetic
MSSETGPVAVDPTLRRRIEPHEFEVFFDPRELRKETCLLYEIKWGTSHKIWRHSSKNTTKHVEVNFIEKFTSERHFCPSTSCSITWFLSWSPCGECSKAITEFLSQHPNVTLVIYVARLYHHMDQQNRQGLRDLVNSGVTIQIMTAPEYDYCWRNFVNYPPGKEAHWPRYPPLWMKLYALELHAGILGLPPCLNILRRKQPQLTFFTIALQSCHYQRLPPHILWATGLK

SEQ ID NO: 334 - protein, 229 aa, Artificial Sequence
  Synthetic
MSSKTGPVAVDPTLRRRIEPHEFEVFFDPRELRKETCLLYEIKWGTSHKIWRHSSKNTTKHVEVNFIEKFTSERHFCPSTSCSITWFLSWSPCGECSKAITEFLSQHPNVTLVIYVARLYHLMNQQNRQGLRDLVNSGVTIQIMTAPEYDYCWHNFVNYPPGKESHWPRYPPLWMKLYALELHAGILGLPPCLNILRRKQSQLTSFTIALQSCHYQRLPPHILWATGLK

SEQ ID NO: 335 - skipped

SEQ ID NO: 336 - protein, 84 aa, Artificial Sequence
  Synthetic
MTNLSDIIEKETGKQLVIQESILMLPEEVEEVIGNKPESDILVHTAYDESTDENVMLLTSDAPEYKPWALVIQDSNGENKIKML

SEQ ID NO: 337 - protein, 7 aa, Artificial Sequence
  Synthetic
PKKKRKV

SEQ ID NO: 338 - protein, 8 aa, Artificial Sequence
  Synthetic
VSRKRPRP

SEQ ID NO: 339 - protein, 9 aa, Artificial Sequence
  Synthetic
PAAKRVKLD

SEQ ID NO: 340 - protein, 9 aa, Artificial Sequence
  Synthetic
KLKIKRPVK

SEQ ID NO: 341 - protein, 10 aa, Artificial Sequence
  Synthetic
EGAPPAKRAR

SEQ ID NO: 342 - protein, 12 aa, Artificial Sequence
  Synthetic
PPQPKKKPLDGE

SEQ ID NO: 343 - protein, 19 aa, Artificial Sequence
  Synthetic
MKRTADGSEFESPKKKRKV

SEQ ID NO: 344 - protein, 20 aa, Artificial Sequence
  Synthetic
AVKRPAATKKAGQAKKKKLD

SEQ ID NO: 345 - protein, 21 aa, Artificial Sequence
  Synthetic
SGGSKRTADGSEFEPKKKRKV

SEQ ID NO: 346 - protein, 25 aa, Artificial Sequence
  Synthetic
MSRRRKANPTKLSENAKKLAKEVEN

SEQ ID NO: 347 - protein, 30 aa, Artificial Sequence
  Synthetic
MDSLLMNRRKFLYQFKNVRWAKGRRETYLC

SEQ ID NO: 348 - protein, 17 aa, Artificial Sequence
  Synthetic
KRTADGSEFEPKKKRKV

SEQ ID NO: 349 - skipped

SEQ ID NO: 350 - protein, 1853 aa, Artificial Sequence
  Synthetic
MKRTADGSEFESPKKKRKVSSETGPVAVDPTLRRRIEPHEFEVFFDPRELRKETCLLYEINWGGRHSIWRHTSQNTNKHVEVNFIEKFTTERYFCPNTRCSITWFLSWSPCGECSRAITEFLSRYPHVTLFIYIARLYHHADPRNRQGLRDLISSGVTIQIMTEQESGYCWRNFVNYSPSNEAHWPRYPHLWVRLYVLELYCIILGLPPCLNILRRKQPQLTFFTIALQSCHYQRLPPHILWATGLKSGGSSGGSSGSETPGTSESATPESSGGSSGGSDKKYSIGLAIGTNSVGWAVITDEYKVPSKKFKVLGNTDRHSIKKNLIGALLFDSGETAEATRLKRTARRRYTRRKNRICYLQEIFSNEMAKVDDSFFHRLEESFLVEEDKKHERHPIFGNIVDEVAYHEKYPTIYHLRKKLVDSTDKADLRLIYLALAHMIKFRGHFLIEGDLNPDNSDVDKLFIQLVQTYNQLFEENPINASGVDAKAILSARLSKSRRLENLIAQLPGEKKNGLFGNLIALSLGLTPNFKSNFDLAEDAKLQLSKDTYDDDLDNLLAQIGDQYADLFLAAKNLSDAILLSDILRVNTEITKAPLSASMIKRYDEHHQDLTLLKALVRQQLPEKYKEIFFDQSKNGYAGYIDGGASQEEFYKFIKPILEKMDGTEELLVKLNREDLLRKQRTFDNGSIPHQIHLGELHAILRRQEDFYPFLKDNREKIEKILTFRIPYYVGPLARGNSRFAWMTRKSEETITPWNFEEVVDKGASAQSFIERMTNFDKNLPNEKVLPKHSLLYEYFTVYNELTKVKYVTEGMRKPAFLSGEQKKAIVDLLFKTNRKVTVKQLKEDYFKKIECFDSVEISGVEDRFNASLGTYHDLLKIIKDKDFLDNEENEDILEDIVLTLTLFEDREMIEERLKTYAHLFDDKVMKQLKRRRYTGWGRLSRKLINGIRDKQSGKTILDFLKSDGFANRNFMQLIHDDSLTFKEDIQKAQVSGQGDSLHEHIANLAGSPAIKKGILQTVKVVDELVKVMGRHKPENIVIEMARENQTTQKGQKNSRERMKRIEEGIKELGSQILKEHPVENTQLQNEKLYLYYLQNGRDMYVDQELDINRLSDYDVDHIVPQSFLKDDSIDNKVLTRSDKNRGKSDNVPSEEVVKKMKNYWRQLLNAKLITQRKFDNLTKAERGGLSELDKAGFIKRQLVETRQITKHVAQILDSRMNTKYDENDKLIREVKVITLKSKLVSDFRKDFQFYKVREINNYHHAHDAYLNAVVGTALIKKYPKLESEFVYGDYKVYDVRKMIAKSEQEIGKATAKYFFYSNIMNFFKTEITLANGEIRKRPLIETNGETGEIVWDKGRDFATVRKVLSMPQVNIVKKTEVQTGGFSKESILPKRNSDKLIARKKDWDPKKYGGFDSPTVAYSVLVVAKVEKGKSKKLKSVKELLGITIMERSSFEKNPIDFLEAKGYKEVKKDLIIKLPKYSLFELENGRKRMLASAGELQKGNELALPSKYVNFLYLASHYEKLKGSPEDNEQKQLFVEQHKHYLDEIIEQISEFSKRVILADANLDKVLSAYNKHRDKPIREQAENIIHLFTLTNLGAPAAFKYFDTTIDRKRYTSTKEVLDATLIHQSITGLYETRIDLSQLGGDSGGSGGSGGSTNLSDIIEKETGKQLVIQESILMLPEEVEEVIGNKPESDILVHTAYDESTDENVMLLTSDAPEYKPWALVIQDSNGENKIKMLSGGSGGSGGSTNLSDIIEKETGKQLVIQESILMLPEEVEEVIGNKPESDILVHTAYDESTDENVMLLTSDAPEYKPWALVIQDSNGENKIKMLSGGSKRTADGSEFEPKKKRKV

SEQ ID NO: 351 - protein, 1853 aa, Artificial Sequence
  Synthetic
MKRTADGSEFESPKKKRKVSSETGPVAVDPTLRRRIEPHEFEVFFDPRELRKETCLLYEINWGGRHSIWRHTSQNTNKHVEVNFIEKFTTERYFCPNTRCSITWFLSYSPCGECSRAITEFLSRYPHVTLFIYIARLYHHADPENRQGLRDLISSGVTIQIMTEQESGYCWRNFVNYSPSNEAHWPRYPHLWVRLYVLELYCIILGLPPCLNILRRKQPQLTFFTIALQSCHYQRLPPHILWATGLKSGGSSGGSSGSETPGTSESATPESSGGSSGGSDKKYSIGLAIGTNSVGWAVITDEYKVPSKKFKVLGNTDRHSIKKNLIGALLFDSGETAEATRLKRTARRRYTRRKNRICYLQEIFSNEMAKVDDSFFHRLEESFLVEEDKKHERHPIFGNIVDEVAYHEKYPTIYHLRKKLVDSTDKADLRLIYLALAHMIKFRGHFLIEGDLNPDNSDVDKLFIQLVQTYNQLFEENPINASGVDAKAILSARLSKSRRLENLIAQLPGEKKNGLFGNLIALSLGLTPNFKSNFDLAEDAKLQLSKDTYDDDLDNLLAQIGDQYADLFLAAKNLSDAILLSDILRVNTEITKAPLSASMIKRYDEHHQDLTLLKALVRQQLPEKYKEIFFDQSKNGYAGYIDGGASQEEFYKFIKPILEKMDGTEELLVKLNREDLLRKQRTFDNGSIPHQIHLGELHAILRRQEDFYPFLKDNREKIEKILTFRIPYYVGPLARGNSRFAWMTRKSEETITPWNFEEVVDKGASAQSFIERMTNFDKNLPNEKVLPKHSLLYEYFTVYNELTKVKYVTEGMRKPAFLSGEQKKAIVDLLFKTNRKVTVKQLKEDYFKKIECFDSVEISGVEDRFNASLGTYHDLLKIIKDKDFLDNEENEDILEDIVLTLTLFEDREMIEERLKTYAHLFDDKVMKQLKRRRYTGWGRLSRKLINGIRDKQSGKTILDFLKSDGFANRNFMQLIHDDSLTFKEDIQKAQVSGQGDSLHEHIANLAGSPAIKKGILQTVKVVDELVKVMGRHKPENIVIEMARENQTTQKGQKNSRERMKRIEEGIKELGSQILKEHPVENTQLQNEKLYLYYLQNGRDMYVDQELDINRLSDYDVDHIVPQSFLKDDSIDNKVLTRSDKNRGKSDNVPSEEVVKKMKNYWRQLLNAKLITQRKFDNLTKAERGGLSELDKAGFIKRQLVETRQITKHVAQILDSRMNTKYDENDKLIREVKVITLKSKLVSDFRKDFQFYKVREINNYHHAHDAYLNAVVGTALIKKYPKLESEFVYGDYKVYDVRKMIAKSEQEIGKATAKYFFYSNIMNFFKTEITLANGEIRKRPLIETNGETGEIVWDKGRDFATVRKVLSMPQVNIVKKTEVQTGGFSKESILPKRNSDKLIARKKDWDPKKYGGFDSPTVAYSVLVVAKVEKGKSKKLKSVKELLGITIMERSSFEKNPIDFLEAKGYKEVKKDLIIKLPKYSLFELENGRKRMLASAGELQKGNELALPSKYVNFLYLASHYEKLKGSPEDNEQKQLFVEQHKHYLDEIIEQISEFSKRVILADANLDKVLSAYNKHRDKPIREQAENIIHLFTLTNLGAPAAFKYFDTTIDRKRYTSTKEVLDATLIHQSITGLYETRIDLSQLGGDSGGSGGSGGSTNLSDIIEKETGKQLVIQESILMLPEEVEEVIGNKPESDILVHTAYDESTDENVMLLTSDAPEYKPWALVIQDSNGENKIKMLSGGSGGSGGSTNLSDIIEKETGKQLVIQESILMLPEEVEEVIGNKPESDILVHTAYDESTDENVMLLTSDAPEYKPWALVIQDSNGENKIKMLSGGSKRTADGSEFEPKKKRKV

SEQ ID NO: 352 - protein, 1853 aa, Artificial Sequence
  Synthetic
MKRTADGSEFESPKKKRKVSSETGPVAVDPTLRRRIEPHEFEVFFDPRELRKETCLLYEINWGGRHSIWRHTSQNTNKHVEVNFIEKFTTERYFCPNTRCSITWFLSYSPCGECSRAITEFLSRYPHVTLFIYIARLYHHADPRNRQGLEDLISSGVTIQIMTEQESGYCWRNFVNYSPSNEAHWPRYPHLWVRLYVLELYCIILGLPPCLNILRRKQPQLTFFTIALQSCHYQRLPPHILWATGLKSGGSSGGSSGSETPGTSESATPESSGGSSGGSDKKYSIGLAIGTNSVGWAVITDEYKVPSKKFKVLGNTDRHSIKKNLIGALLFDSGETAEATRLKRTARRRYTRRKNRICYLQEIFSNEMAKVDDSFFHRLEESFLVEEDKKHERHPIFGNIVDEVAYHEKYPTIYHLRKKLVDSTDKADLRLIYLALAHMIKFRGHFLIEGDLNPDNSDVDKLFIQLVQTYNQLFEENPINASGVDAKAILSARLSKSRRLENLIAQLPGEKKNGLFGNLIALSLGLTPNFKSNFDLAEDAKLQLSKDTYDDDLDNLLAQIGDQYADLFLAAKNLSDAILLSDILRVNTEITKAPLSASMIKRYDEHHQDLTLLKALVRQQLPEKYKEIFFDQSKNGYAGYIDGGASQEEFYKFIKPILEKMDGTEELLVKLNREDLLRKQRTFDNGSIPHQIHLGELHAILRRQEDFYPFLKDNREKIEKILTFRIPYYVGPLARGNSRFAWMTRKSEETITPWNFEEVVDKGASAQSFIERMTNFDKNLPNEKVLPKHSLLYEYFTVYNELTKVKYVTEGMRKPAFLSGEQKKAIVDLLFKTNRKVTVKQLKEDYFKKIECFDSVEISGVEDRFNASLGTYHDLLKIIKDKDFLDNEENEDILEDIVLTLTLFEDREMIEERLKTYAHLFDDKVMKQLKRRRYTGWGRLSRKLINGIRDKQSGKTILDFLKSDGFANRNFMQLIHDDSLTFKEDIQKAQVSGQGDSLHEHIANLAGSPAIKKGILQTVKVVDELVKVMGRHKPENIVIEMARENQTTQKGQKNSRERMKRIEEGIKELGSQILKEHPVENTQLQNEKLYLYYLQNGRDMYVDQELDINRLSDYDVDHIVPQSFLKDDSIDNKVLTRSDKNRGKSDNVPSEEVVKKMKNYWRQLLNAKLITQRKFDNLTKAERGGLSELDKAGFIKRQLVETRQITKHVAQILDSRMNTKYDENDKLIREVKVITLKSKLVSDFRKDFQFYKVREINNYHHAHDAYLNAVVGTALIKKYPKLESEFVYGDYKVYDVRKMIAKSEQEIGKATAKYFFYSNIMNFFKTEITLANGEIRKRPLIETNGETGEIVWDKGRDFATVRKVLSMPQVNIVKKTEVQTGGFSKESILPKRNSDKLIARKKDWDPKKYGGFDSPTVAYSVLVVAKVEKGKSKKLKSVKELLGITIMERSSFEKNPIDFLEAKGYKEVKKDLIIKLPKYSLFELENGRKRMLASAGELQKGNELALPSKYVNFLYLASHYEKLKGSPEDNEQKQLFVEQHKHYLDEIIEQISEFSKRVILADANLDKVLSAYNKHRDKPIREQAENIIHLFTLTNLGAPAAFKYFDTTIDRKRYTSTKEVLDATLIHQSITGLYETRIDLSQLGGDSGGSGGSGGSTNLSDIIEKETGKQLVIQESILMLPEEVEEVIGNKPESDILVHTAYDESTDENVMLLTSDAPEYKPWALVIQDSNGENKIKMLSGGSGGSGGSTNLSDIIEKETGKQLVIQESILMLPEEVEEVIGNKPESDILVHTAYDESTDENVMLLTSDAPEYKPWALVIQDSNGENKIKMLSGGSKRTADGSEFEPKKKRKV

SEQ ID NO: 353 - protein, 1853 aa, Artificial Sequence
  Synthetic
MKRTADGSEFESPKKKRKVSSETGPVAVDPTLRRRIEPHEFEVFFDPRELRKETCLLYEINWGGRHSIWRHTSQNTNKHVEVNFIEKFTTERYFCPNTRCSITWFLSYSPCGECSRAITEFLSRYPHVTLFIYIARLYHHADPENRQGLEDLISSGVTIQIMTEQESGYCWRNFVNYSPSNEAHWPRYPHLWVRLYVLELYCIILGLPPCLNILRRKQPQLTFFTIALQSCHYQRLPPHILWATGLKSGGSSGGSSGSETPGTSESATPESSGGSSGGSDKKYSIGLAIGTNSVGWAVITDEYKVPSKKFKVLGNTDRHSIKKNLIGALLFDSGETAEATRLKRTARRRYTRRKNRICYLQEIFSNEMAKVDDSFFHRLEESFLVEEDKKHERHPIFGNIVDEVAYHEKYPTIYHLRKKLVDSTDKADLRLIYLALAHMIKFRGHFLIEGDLNPDNSDVDKLFIQLVQTYNQLFEENPINASGVDAKAILSARLSKSRRLENLIAQLPGEKKNGLFGNLIALSLGLTPNFKSNFDLAEDAKLQLSKDTYDDDLDNLLAQIGDQYADLFLAAKNLSDAILLSDILRVNTEITKAPLSASMIKRYDEHHQDLTLLKALVRQQLPEKYKEIFFDQSKNGYAGYIDGGASQEEFYKFIKPILEKMDGTEELLVKLNREDLLRKQRTFDNGSIPHQIHLGELHAILRRQEDFYPFLKDNREKIEKILTFRIPYYVGPLARGNSRFAWMTRKSEETITPWNFEEVVDKGASAQSFIERMTNFDKNLPNEKVLPKHSLLYEYFTVYNELTKVKYVTEGMRKPAFLSGEQKKAIVDLLFKTNRKVTVKQLKEDYFKKIECFDSVEISGVEDRFNASLGTYHDLLKIIKDKDFLDNEENEDILEDIVLTLTLFEDREMIEERLKTYAHLFDDKVMKQLKRRRYTGWGRLSRKLINGIRDKQSGKTILDFLKSDGFANRNFMQLIHDDSLTFKEDIQKAQVSGQGDSLHEHIANLAGSPAIKKGILQTVKVVDELVKVMGRHKPENIVIEMARENQTTQKGQKNSRERMKRIEEGIKELGSQILKEHPVENTQLQNEKLYLYYLQNGRDMYVDQELDINRLSDYDVDHIVPQSFLKDDSIDNKVLTRSDKNRGKSDNVPSEEVVKKMKNYWRQLLNAKLITQRKFDNLTKAERGGLSELDKAGFIKRQLVETRQITKHVAQILDSRMNTKYDENDKLIREVKVITLKSKLVSDFRKDFQFYKVREINNYHHAHDAYLNAVVGTALIKKYPKLESEFVYGDYKVYDVRKMIAKSEQEIGKATAKYFFYSNIMNFFKTEITLANGEIRKRPLIETNGETGEIVWDKGRDFATVRKVLSMPQVNIVKKTEVQTGGFSKESILPKRNSDKLIARKKDWDPKKYGGFDSPTVAYSVLVVAKVEKGKSKKLKSVKELLGITIMERSSFEKNPIDFLEAKGYKEVKKDLIIKLPKYSLFELENGRKRMLASAGELQKGNELALPSKYVNFLYLASHYEKLKGSPEDNEQKQLFVEQHKHYLDEIIEQISEFSKRVILADANLDKVLSAYNKHRDKPIREQAENIIHLFTLTNLGAPAAFKYFDTTIDRKRYTSTKEVLDATLIHQSITGLYETRIDLSQLGGDSGGSGGSGGSTNLSDIIEKETGKQLVIQESILMLPEEVEEVIGNKPESDILVHTAYDESTDENVMLLTSDAPEYKPWALVIQDSNGENKIKMLSGGSGGSGGSTNLSDIIEKETGKQLVIQESILMLPEEVEEVIGNKPESDILVHTAYDESTDENVMLLTSDAPEYKPWALVIQDSNGENKIKMLSGGSKRTADGSEFEPKKKRKV

SEQ ID NO: 354 - protein, 1853 aa, Artificial Sequence
  Synthetic
MKRTADGSEFESPKKKRKVSSETGPVAVDPTLRRRIEPHEFEVFFDPRELRKETCLLYEINWGGRHSIWRHTSQNTNKHVEVNFIEKFTTERYFCPNTRCSITWFLSWSPCGECSRAITEFLSRYPHVTLFIYIARLYHHADPENRQGLEDLISSGVTIQIMTEQESGYCWRNFVNYSPSNEAHWPRYPHLWVRLYVLELYCIILGLPPCLNILRRKQPQLTFFTIALQSCHYQRLPPHILWATGLKSGGSSGGSSGSETPGTSESATPESSGGSSGGSDKKYSIGLAIGTNSVGWAVITDEYKVPSKKFKVLGNTDRHSIKKNLIGALLFDSGETAEATRLKRTARRRYTRRKNRICYLQEIFSNEMAKVDDSFFHRLEESFLVEEDKKHERHPIFGNIVDEVAYHEKYPTIYHLRKKLVDSTDKADLRLIYLALAHMIKFRGHFLIEGDLNPDNSDVDKLFIQLVQTYNQLFEENPINASGVDAKAILSARLSKSRRLENLIAQLPGEKKNGLFGNLIALSLGLTPNFKSNFDLAEDAKLQLSKDTYDDDLDNLLAQIGDQYADLFLAAKNLSDAILLSDILRVNTEITKAPLSASMIKRYDEHHQDLTLLKALVRQQLPEKYKEIFFDQSKNGYAGYIDGGASQEEFYKFIKPILEKMDGTEELLVKLNREDLLRKQRTFDNGSIPHQIHLGELHAILRRQEDFYPFLKDNREKIEKILTFRIPYYVGPLARGNSRFAWMTRKSEETITPWNFEEVVDKGASAQSFIERMTNFDKNLPNEKVLPKHSLLYEYFTVYNELTKVKYVTEGMRKPAFLSGEQKKAIVDLLFKTNRKVTVKQLKEDYFKKIECFDSVEISGVEDRFNASLGTYHDLLKIIKDKDFLDNEENEDILEDIVLTLTLFEDREMIEERLKTYAHLFDDKVMKQLKRRRYTGWGRLSRKLINGIRDKQSGKTILDFLKSDGFANRNFMQLIHDDSLTFKEDIQKAQVSGQGDSLHEHIANLAGSPAIKKGILQTVKVVDELVKVMGRHKPENIVIEMARENQTTQKGQKNSRERMKRIEEGIKELGSQILKEHPVENTQLQNEKLYLYYLQNGRDMYVDQELDINRLSDYDVDHIVPQSFLKDDSIDNKVLTRSDKNRGKSDNVPSEEVVKKMKNYWRQLLNAKLITQRKFDNLTKAERGGLSELDKAGFIKRQLVETRQITKHVAQILDSRMNTKYDENDKLIREVKVITLKSKLVSDFRKDFQFYKVREINNYHHAHDAYLNAVVGTALIKKYPKLESEFVYGDYKVYDVRKMIAKSEQEIGKATAKYFFYSNIMNFFKTEITLANGEIRKRPLIETNGETGEIVWDKGRDFATVRKVLSMPQVNIVKKTEVQTGGFSKESILPKRNSDKLIARKKDWDPKKYGGFDSPTVAYSVLVVAKVEKGKSKKLKSVKELLGITIMERSSFEKNPIDFLEAKGYKEVKKDLIIKLPKYSLFELENGRKRMLASAGELQKGNELALPSKYVNFLYLASHYEKLKGSPEDNEQKQLFVEQHKHYLDEIIEQISEFSKRVILADANLDKVLSAYNKHRDKPIREQAENIIHLFTLTNLGAPAAFKYFDTTIDRKRYTSTKEVLDATLIHQSITGLYETRIDLSQLGGDSGGSGGSGGSTNLSDIIEKETGKQLVIQESILMLPEEVEEVIGNKPESDILVHTAYDESTDENVMLLTSDAPEYKPWALVIQDSNGENKIKMLSGGSGGSGGSTNLSDIIEKETGKQLVIQESILMLPEEVEEVIGNKPESDILVHTAYDESTDENVMLLTSDAPEYKPWALVIQDSNGENKIKMLSGGSKRTADGSEFEPKKKRKV

SEQ ID NO: 355 - protein, 1853 aa, Artificial Sequence
  Synthetic
MKRTADGSEFESPKKKRKVSSETGPVAVDPTLRRRIEPHEFEVFFDPRELAKETCLLYEINWGGRHSIWRHTSQNTNKHVEVNFIEKFTTERYFCPNTRCSITWFLSWSPCGECSRAITEFLSRYPHVTLFIYIARLYHHADPRNRQGLRDLISSGVTIQIMTEQESGYCWRNFVNYSPSNEAHWPRYPHLWVRLYVLELYCIILGLPPCLNILRRKQPQLTFFTIALQSCHYQRLPPHILWATGLKSGGSSGGSSGSETPGTSESATPESSGGSSGGSDKKYSIGLAIGTNSVGWAVITDEYKVPSKKFKVLGNTDRHSIKKNLIGALLFDSGETAEATRLKRTARRRYTRRKNRICYLQEIFSNEMAKVDDSFFHRLEESFLVEEDKKHERHPIFGNIVDEVAYHEKYPTIYHLRKKLVDSTDKADLRLIYLALAHMIKFRGHFLIEGDLNPDNSDVDKLFIQLVQTYNQLFEENPINASGVDAKAILSARLSKSRRLENLIAQLPGEKKNGLFGNLIALSLGLTPNFKSNFDLAEDAKLQLSKDTYDDDLDNLLAQIGDQYADLFLAAKNLSDAILLSDILRVNTEITKAPLSASMIKRYDEHHQDLTLLKALVRQQLPEKYKEIFFDQSKNGYAGYIDGGASQEEFYKFIKPILEKMDGTEELLVKLNREDLLRKQRTFDNGSIPHQIHLGELHAILRRQEDFYPFLKDNREKIEKILTFRIPYYVGPLARGNSRFAWMTRKSEETITPWNFEEVVDKGASAQSFIERMTNFDKNLPNEKVLPKHSLLYEYFTVYNELTKVKYVTEGMRKPAFLSGEQKKAIVDLLFKTNRKVTVKQLKEDYFKKIECFDSVEISGVEDRFNASLGTYHDLLKIIKDKDFLDNEENEDILEDIVLTLTLFEDREMIEERLKTYAHLFDDKVMKQLKRRRYTGWGRLSRKLINGIRDKQSGKTILDFLKSDGFANRNFMQLIHDDSLTFKEDIQKAQVSGQGDSLHEHIANLAGSPAIKKGILQTVKVVDELVKVMGRHKPENIVIEMARENQTTQKGQKNSRERMKRIEEGIKELGSQILKEHPVENTQLQNEKLYLYYLQNGRDMYVDQELDINRLSDYDVDHIVPQSFLKDDSIDNKVLTRSDKNRGKSDNVPSEEVVKKMKNYWRQLLNAKLITQRKFDNLTKAERGGLSELDKAGFIKRQLVETRQITKHVAQILDSRMNTKYDENDKLIREVKVITLKSKLVSDFRKDFQFYKVREINNYHHAHDAYLNAVVGTALIKKYPKLESEFVYGDYKVYDVRKMIAKSEQEIGKATAKYFFYSNIMNFFKTEITLANGEIRKRPLIETNGETGEIVWDKGRDFATVRKVLSMPQVNIVKKTEVQTGGFSKESILPKRNSDKLIARKKDWDPKKYGGFDSPTVAYSVLVVAKVEKGKSKKLKSVKELLGITIMERSSFEKNPIDFLEAKGYKEVKKDLIIKLPKYSLFELENGRKRMLASAGELQKGNELALPSKYVNFLYLASHYEKLKGSPEDNEQKQLFVEQHKHYLDEIIEQISEFSKRVILADANLDKVLSAYNKHRDKPIREQAENIIHLFTLTNLGAPAAFKYFDTTIDRKRYTSTKEVLDATLIHQSITGLYETRIDLSQLGGDSGGSGGSGGSTNLSDIIEKETGKQLVIQESILMLPEEVEEVIGNKPESDILVHTAYDESTDENVMLLTSDAPEYKPWALVIQDSNGENKIKMLSGGSGGSGGSTNLSDIIEKETGKQLVIQESILMLPEEVEEVIGNKPESDILVHTAYDESTDENVMLLTSDAPEYKPWALVIQDSNGENKIKMLSGGSKRTADGSEFEPKKKRKV

SEQ ID NO: 356 - protein, 1853 aa, Artificial Sequence
  Synthetic
MKRTADGSEFESPKKKRKVSSETGPVAVDPTLRRRIEPHEFEVFFDPRELAAETCLLYEINWGGRHSIWRHTSQNTNKHVEVNFIEKFTTERYFCPNTRCSITWFLSWSPCGECSRAITEFLSRYPHVTLFIYIARLYHHADPRNRQGLRDLISSGVTIQIMTEQESGYCWRNFVNYSPSNEAHWPRYPHLWVRLYVLELYCIILGLPPCLNILRRKQPQLTFFTIALQSCHYQRLPPHILWATGLKSGGSSGGSSGSETPGTSESATPESSGGSSGGSDKKYSIGLAIGTNSVGWAVITDEYKVPSKKFKVLGNTDRHSIKKNLIGALLFDSGETAEATRLKRTARRRYTRRKNRICYLQEIFSNEMAKVDDSFFHRLEESFLVEEDKKHERHPIFGNIVDEVAYHEKYPTIYHLRKKLVDSTDKADLRLIYLALAHMIKFRGHFLIEGDLNPDNSDVDKLFIQLVQTYNQLFEENPINASGVDAKAILSARLSKSRRLENLIAQLPGEKKNGLFGNLIALSLGLTPNFKSNFDLAEDAKLQLSKDTYDDDLDNLLAQIGDQYADLFLAAKNLSDAILLSDILRVNTEITKAPLSASMIKRYDEHHQDLTLLKALVRQQLPEKYKEIFFDQSKNGYAGYIDGGASQEEFYKFIKPILEKMDGTEELLVKLNREDLLRKQRTFDNGSIPHQIHLGELHAILRRQEDFYPFLKDNREKIEKILTFRIPYYVGPLARGNSRFAWMTRKSEETITPWNFEEVVDKGASAQSFIERMTNFDKNLPNEKVLPKHSLLYEYFTVYNELTKVKYVTEGMRKPAFLSGEQKKAIVDLLFKTNRKVTVKQLKEDYFKKIECFDSVEISGVEDRFNASLGTYHDLLKIIKDKDFLDNEENEDILEDIVLTLTLFEDREMIEERLKTYAHLFDDKVMKQLKRRRYTGWGRLSRKLINGIRDKQSGKTILDFLKSDGFANRNFMQLIHDDSLTFKEDIQKAQVSGQGDSLHEHIANLAGSPAIKKGILQTVKVVDELVKVMGRHKPENIVIEMARENQTTQKGQKNSRERMKRIEEGIKELGSQILKEHPVENTQLQNEKLYLYYLQNGRDMYVDQELDINRLSDYDVDHIVPQSFLKDDSIDNKVLTRSDKNRGKSDNVPSEEVVKKMKNYWRQLLNAKLITQRKFDNLTKAERGGLSELDKAGFIKRQLVETRQITKHVAQILDSRMNTKYDENDKLIREVKVITLKSKLVSDFRKDFQFYKVREINNYHHAHDAYLNAVVGTALIKKYPKLESEFVYGDYKVYDVRKMIAKSEQEIGKATAKYFFYSNIMNFFKTEITLANGEIRKRPLIETNGETGEIVWDKGRDFATVRKVLSMPQVNIVKKTEVQTGGFSKESILPKRNSDKLIARKKDWDPKKYGGFDSPTVAYSVLVVAKVEKGKSKKLKSVKELLGITIMERSSFEKNPIDFLEAKGYKEVKKDLIIKLPKYSLFELENGRKRMLASAGELQKGNELALPSKYVNFLYLASHYEKLKGSPEDNEQKQLFVEQHKHYLDEIIEQISEFSKRVILADANLDKVLSAYNKHRDKPIREQAENIIHLFTLTNLGAPAAFKYFDTTIDRKRYTSTKEVLDATLIHQSITGLYETRIDLSQLGGDSGGSGGSGGSTNLSDIIEKETGKQLVIQESILMLPEEVEEVIGNKPESDILVHTAYDESTDENVMLLTSDAPEYKPWALVIQDSNGENKIKMLSGGSGGSGGSTNLSDIIEKETGKQLVIQESILMLPEEVEEVIGNKPESDILVHTAYDESTDENVMLLTSDAPEYKPWALVIQDSNGENKIKMLSGGSKRTADGSEFEPKKKRKV

SEQ ID NO: 357 - protein, 1824 aa, Artificial Sequence
  Synthetic
MKRTADGSEFESPKKKRKVSEASPASGPRHLMDPHIFTSNFNNGIGRHKTYLCYEVERLDNGTSVKMDQHRGFLHNQAKNLLCGFYGRHAELRFLDLVPSLQLDPAQIYRVTWFISWSPCFSWGCAGEVRAFLQENTHVRLRIFAARIYDYDPLYKEALQMLRDAGAQVSIMTYDEFKHCWDTFVDHQGCPFQPWDGLDEHSQALSGRLRAILQNQGNSGGSSGGSSGSETPGTSESATPESSGGSSGGSDKKYSIGLAIGTNSVGWAVITDEYKVPSKKFKVLGNTDRHSIKKNLIGALLFDSGETAEATRLKRTARRRYTRRKNRICYLQEIFSNEMAKVDDSFFHRLEESFLVEEDKKHERHPIFGNIVDEVAYHEKYPTIYHLRKKLVDSTDKADLRLIYLALAHMIKFRGHFLIEGDLNPDNSDVDKLFIQLVQTYNQLFEENPINASGVDAKAILSARLSKSRRLENLIAQLPGEKKNGLFGNLIALSLGLTPNFKSNFDLAEDAKLQLSKDTYDDDLDNLLAQIGDQYADLFLAAKNLSDAILLSDILRVNTEITKAPLSASMIKRYDEHHQDLTLLKALVRQQLPEKYKEIFFDQSKNGYAGYIDGGASQEEFYKFIKPILEKMDGTEELLVKLNREDLLRKQRTFDNGSIPHQIHLGELHAILRRQEDFYPFLKDNREKIEKILTFRIPYYVGPLARGNSRFAWMTRKSEETITPWNFEEVVDKGASAQSFIERMTNFDKNLPNEKVLPKHSLLYEYFTVYNELTKVKYVTEGMRKPAFLSGEQKKAIVDLLFKTNRKVTVKQLKEDYFKKIECFDSVEISGVEDRFNASLGTYHDLLKIIKDKDFLDNEENEDILEDIVLTLTLFEDREMIEERLKTYAHLFDDKVMKQLKRRRYTGWGRLSRKLINGIRDKQSGKTILDFLKSDGFANRNFMQLIHDDSLTFKEDIQKAQVSGQGDSLHEHIANLAGSPAIKKGILQTVKVVDELVKVMGRHKPENIVIEMARENQTTQKGQKNSRERMKRIEEGIKELGSQILKEHPVENTQLQNEKLYLYYLQNGRDMYVDQELDINRLSDYDVDHIVPQSFLKDDSIDNKVLTRSDKNRGKSDNVPSEEVVKKMKNYWRQLLNAKLITQRKFDNLTKAERGGLSELDKAGFIKRQLVETRQITKHVAQILDSRMNTKYDENDKLIREVKVITLKSKLVSDFRKDFQFYKVREINNYHHAHDAYLNAVVGTALIKKYPKLESEFVYGDYKVYDVRKMIAKSEQEIGKATAKYFFYSNIMNFFKTEITLANGEIRKRPLIETNGETGEIVWDKGRDFATVRKVLSMPQVNIVKKTEVQTGGFSKESILPKRNSDKLIARKKDWDPKKYGGFDSPTVAYSVLVVAKVEKGKSKKLKSVKELLGITIMERSSFEKNPIDFLEAKGYKEVKKDLIIKLPKYSLFELENGRKRMLASAGELQKGNELALPSKYVNFLYLASHYEKLKGSPEDNEQKQLFVEQHKHYLDEIIEQISEFSKRVILADANLDKVLSAYNKHRDKPIREQAENIIHLFTLTNLGAPAAFKYFDTTIDRKRYTSTKEVLDATLIHQSITGLYETRIDLSQLGGDSGGSGGSGGSTNLSDIIEKETGKQLVIQESILMLPEEVEEVIGNKPESDILVHTAYDESTDENVMLLTSDAPEYKPWALVIQDSNGENKIKMLSGGSGGSGGSTNLSDIIEKETGKQLVIQESILMLPEEVEEVIGNKPESDILVHTAYDESTDENVMLLTSDAPEYKPWALVIQDSNGENKIKMLSGGSKRTADGSEFEPKKKRKV

SEQ ID NO: 358 - protein, 2006 aa, Artificial Sequence
  Synthetic
MKRTADGSEFESPKKKRKVNPQIRNPMERMYRDTFYDNFENEPILYGRSYTWLCYEVKIKRGRSNLLWDTGVFRGQVYFKPQYHAEMCFLSWFCGNQLPAYKCFQITWFVSWTPCPDCVAKLAEFLSEHPNVTLTISAARLYYYWERDYRRALCRLSQAGARVTIMDYEEFAYCWENFVYNEGQQFMPWYKFDENYAFLHRTLKEILRYLMDPDTFTFNFNNDPLVLRRRQTYLCYEVERLDNGTWVLMDQHMGFLCNEAKNLLCGFYGRHAELRFLDLVPSLQLDPAQIYRVTWFISWSPCFSWGCAGEVRAFLQENTHVRLRIFAARIYDYDPLYKEALQMLRDAGAQVSIMTYDEFEYCWDTFVYRQGCPFQPWDGLEEHSQALSGRLRAILQNQGNSGGSSGGSSGSETPGTSESATPESSGGSSGGSDKKYSIGLAIGTNSVGWAVITDEYKVPSKKFKVLGNTDRHSIKKNLIGALLFDSGETAEATRLKRTARRRYTRRKNRICYLQEIFSNEMAKVDDSFFHRLEESFLVEEDKKHERHPIFGNIVDEVAYHEKYPTIYHLRKKLVDSTDKADLRLIYLALAHMIKFRGHFLIEGDLNPDNSDVDKLFIQLVQTYNQLFEENPINASGVDAKAILSARLSKSRRLENLIAQLPGEKKNGLFGNLIALSLGLTPNFKSNFDLAEDAKLQLSKDTYDDDLDNLLAQIGDQYADLFLAAKNLSDAILLSDILRVNTEITKAPLSASMIKRYDEHHQDLTLLKALVRQQLPEKYKEIFFDQSKNGYAGYIDGGASQEEFYKFIKPILEKMDGTEELLVKLNREDLLRKQRTFDNGSIPHQIHLGELHAILRRQEDFYPFLKDNREKIEKILTFRIPYYVGPLARGNSRFAWMTRKSEETITPWNFEEVVDKGASAQSFIERMTNFDKNLPNEKVLPKHSLLYEYFTVYNELTKVKYVTEGMRKPAFLSGEQKKAIVDLLFKTNRKVTVKQLKEDYFKKIECFDSVEISGVEDRFNASLGTYHDLLKIIKDKDFLDNEENEDILEDIVLTLTLFEDREMIEERLKTYAHLFDDKVMKQLKRRRYTGWGRLSRKLINGIRDKQSGKTILDFLKSDGFANRNFMQLIHDDSLTFKEDIQKAQVSGQGDSLHEHIANLAGSPAIKKGILQTVKVVDELVKVMGRHKPENIVIEMARENQTTQKGQKNSRERMKRIEEGIKELGSQILKEHPVENTQLQNEKLYLYYLQNGRDMYVDQELDINRLSDYDVDHIVPQSFLKDDSIDNKVLTRSDKNRGKSDNVPSEEVVKKMKNYWRQLLNAKLITQRKFDNLTKAERGGLSELDKAGFIKRQLVETRQITKHVAQILDSRMNTKYDENDKLIREVKVITLKSKLVSDFRKDFQFYKVREINNYHHAHDAYLNAVVGTALIKKYPKLESEFVYGDYKVYDVRKMIAKSEQEIGKATAKYFFYSNIMNFFKTEITLANGEIRKRPLIETNGETGEIVWDKGRDFATVRKVLSMPQVNIVKKTEVQTGGFSKESILPKRNSDKLIARKKDWDPKKYGGFDSPTVAYSVLVVAKVEKGKSKKLKSVKELLGITIMERSSFEKNPIDFLEAKGYKEVKKDLIIKLPKYSLFELENGRKRMLASAGELQKGNELALPSKYVNFLYLASHYEKLKGSPEDNEQKQLFVEQHKHYLDEIIEQISEFSKRVILADANLDKVLSAYNKHRDKPIREQAENIIHLFTLTNLGAPAAFKYFDTTIDRKRYTSTKEVLDATLIHQSITGLYETRIDLSQLGGDSGGSGGSGGSTNLSDIIEKETGKQLVIQESILMLPEEVEEVIGNKPESDILVHTAYDESTDENVMLLTSDAPEYKPWALVIQDSNGENKIKMLSGGSGGSGGSTNLSDIIEKETGKQLVIQESILMLPEEVEEVIGNKPESDILVHTAYDESTDENVMLLTSDAPEYKPWALVIQDSNGENKIKMLSGGSKRTADGSEFEPKKKRKV

SEQ ID NO: 359 - protein, 2008 aa, Artificial Sequence
  Synthetic
MKRTADGSEFESPKKKRKVKPHFRNTVERMYRDTFSYNFYNRPILSRRNTVWLCYEVKTKGPSRPPLDAKIFRGQVYSELKYHPEMRFFHWFSKWRKLHRDQEYEVTWYISWSPCTKCTRDMATFLAEDPKVTLTIFVARLYYFWDPDYQEALRSLCQKRDGPRATMKIMNYDEFQHCWSKFVYSQRELFEPWNNLPKYYILLHIMLGEILRHSMDPPTFTFNFNNEPWVRGRHETYLCYEVERMHNDTWVLLNQRRGFLCNQAPHKHGFLEGRHAELCFLDVIPFWKLDLDQDYRVTCFTSWSPCFSCAQEMAKFISKNKHVSLCIFTARIYDDQGRCQEGLRTLAEAGAKISIMTYSEFKHCWDTFVDHQGCPFQPWDGLDEHSQDLSGRLRAILQNQENSGGSSGGSSGSETPGTSESATPESSGGSSGGSDKKYSIGLAIGTNSVGWAVITDEYKVPSKKFKVLGNTDRHSIKKNLIGALLFDSGETAEATRLKRTARRRYTRRKNRICYLQEIFSNEMAKVDDSFFHRLEESFLVEEDKKHERHPIFGNIVDEVAYHEKYPTIYHLRKKLVDSTDKADLRLIYLALAHMIKFRGHFLIEGDLNPDNSDVDKLFIQLVQTYNQLFEENPINASGVDAKAILSARLSKSRRLENLIAQLPGEKKNGLFGNLIALSLGLTPNFKSNFDLAEDAKLQLSKDTYDDDLDNLLAQIGDQYADLFLAAKNLSDAILLSDILRVNTEITKAPLSASMIKRYDEHHQDLTLLKALVRQQLPEKYKEIFFDQSKNGYAGYIDGGASQEEFYKFIKPILEKMDGTEELLVKLNREDLLRKQRTFDNGSIPHQIHLGELHAILRRQEDFYPFLKDNREKIEKILTFRIPYYVGPLARGNSRFAWMTRKSEETITPWNFEEVVDKGASAQSFIERMTNFDKNLPNEKVLPKHSLLYEYFTVYNELTKVKYVTEGMRKPAFLSGEQKKAIVDLLFKTNRKVTVKQLKEDYFKKIECFDSVEISGVEDRFNASLGTYHDLLKIIKDKDFLDNEENEDILEDIVLTLTLFEDREMIEERLKTYAHLFDDKVMKQLKRRRYTGWGRLSRKLINGIRDKQSGKTILDFLKSDGFANRNFMQLIHDDSLTFKEDIQKAQVSGQGDSLHEHIANLAGSPAIKKGILQTVKVVDELVKVMGRHKPENIVIEMARENQTTQKGQKNSRERMKRIEEGIKELGSQILKEHPVENTQLQNEKLYLYYLQNGRDMYVDQELDINRLSDYDVDHIVPQSFLKDDSIDNKVLTRSDKNRGKSDNVPSEEVVKKMKNYWRQLLNAKLITQRKFDNLTKAERGGLSELDKAGFIKRQLVETRQITKHVAQILDSRMNTKYDENDKLIREVKVITLKSKLVSDFRKDFQFYKVREINNYHHAHDAYLNAVVGTALIKKYPKLESEFVYGDYKVYDVRKMIAKSEQEIGKATAKYFFYSNIMNFFKTEITLANGEIRKRPLIETNGETGEIVWDKGRDFATVRKVLSMPQVNIVKKTEVQTGGFSKESILPKRNSDKLIARKKDWDPKKYGGFDSPTVAYSVLVVAKVEKGKSKKLKSVKELLGITIMERSSFEKNPIDFLEAKGYKEVKKDLIIKLPKYSLFELENGRKRMLASAGELQKGNELALPSKYVNFLYLASHYEKLKGSPEDNEQKQLFVEQHKHYLDEIIEQISEFSKRVILADANLDKVLSAYNKHRDKPIREQAENIIHLFTLTNLGAPAAFKYFDTTIDRKRYTSTKEVLDATLIHQSITGLYETRIDLSQLGGDSGGSGGSGGSTNLSDIIEKETGKQLVIQESILMLPEEVEEVIGNKPESDILVHTAYDESTDENVMLLTSDAPEYKPWALVIQDSNGENKIKMLSGGSGGSGGSTNLSDIIEKETGKQLVIQESILMLPEEVEEVIGNKPESDILVHTAYDESTDENVMLLTSDAPEYKPWALVIQDSNGENKIKMLSGGSKRTADGSEFEPKKKRKV

SEQ ID NO: 360 - protein, 1822 aa, Artificial Sequence
  Synthetic
MKRTADGSEFESPKKKRKVDSLLMNRRKFLYQFKNVRWAKGRRETYLCYVVKRRDSATSFSLDFGYLRNKNGCHVELLFLRYISDWDLDPGRCYRVTWFTSWSPCYDCARHVADFLRGNPNLSLRIFTARLYFCEDRKAEPEGLRRLHRAGVQIAIMTFKDYFYCWNTFVENHERTFKAWEGLHENSVRLSRQLRRILLPLYEVDDLRDAFRTLGLSGGSSGGSSGSETPGTSESATPESSGGSSGGSDKKYSIGLAIGTNSVGWAVITDEYKVPSKKFKVLGNTDRHSIKKNLIGALLFDSGETAEATRLKRTARRRYTRRKNRICYLQEIFSNEMAKVDDSFFHRLEESFLVEEDKKHERHPIFGNIVDEVAYHEKYPTIYHLRKKLVDSTDKADLRLIYLALAHMIKFRGHFLIEGDLNPDNSDVDKLFIQLVQTYNQLFEENPINASGVDAKAILSARLSKSRRLENLIAQLPGEKKNGLFGNLIALSLGLTPNFKSNFDLAEDAKLQLSKDTYDDDLDNLLAQIGDQYADLFLAAKNLSDAILLSDILRVNTEITKAPLSASMIKRYDEHHQDLTLLKALVRQQLPEKYKEIFFDQSKNGYAGYIDGGASQEEFYKFIKPILEKMDGTEELLVKLNREDLLRKQRTFDNGSIPHQIHLGELHAILRRQEDFYPFLKDNREKIEKILTFRIPYYVGPLARGNSRFAWMTRKSEETITPWNFEEVVDKGASAQSFIERMTNFDKNLPNEKVLPKHSLLYEYFTVYNELTKVKYVTEGMRKPAFLSGEQKKAIVDLLFKTNRKVTVKQLKEDYFKKIECFDSVEISGVEDRFNASLGTYHDLLKIIKDKDFLDNEENEDILEDIVLTLTLFEDREMIEERLKTYAHLFDDKVMKQLKRRRYTGWGRLSRKLINGIRDKQSGKTILDFLKSDGFANRNFMQLIHDDSLTFKEDIQKAQVSGQGDSLHEHIANLAGSPAIKKGILQTVKVVDELVKVMGRHKPENIVIEMARENQTTQKGQKNSRERMKRIEEGIKELGSQILKEHPVENTQLQNEKLYLYYLQNGRDMYVDQELDINRLSDYDVDHIVPQSFLKDDSIDNKVLTRSDKNRGKSDNVPSEEVVKKMKNYWRQLLNAKLITQRKFDNLTKAERGGLSELDKAGFIKRQLVETRQITKHVAQILDSRMNTKYDENDKLIREVKVITLKSKLVSDFRKDFQFYKVREINNYHHAHDAYLNAVVGTALIKKYPKLESEFVYGDYKVYDVRKMIAKSEQEIGKATAKYFFYSNIMNFFKTEITLANGEIRKRPLIETNGETGEIVWDKGRDFATVRKVLSMPQVNIVKKTEVQTGGFSKESILPKRNSDKLIARKKDWDPKKYGGFDSPTVAYSVLVVAKVEKGKSKKLKSVKELLGITIMERSSFEKNPIDFLEAKGYKEVKKDLIIKLPKYSLFELENGRKRMLASAGELQKGNELALPSKYVNFLYLASHYEKLKGSPEDNEQKQLFVEQHKHYLDEIIEQISEFSKRVILADANLDKVLSAYNKHRDKPIREQAENIIHLFTLTNLGAPAAFKYFDTTIDRKRYTSTKEVLDATLIHQSITGLYETRIDLSQLGGDSGGSGGSGGSTNLSDIIEKETGKQLVIQESILMLPEEVEEVIGNKPESDILVHTAYDESTDENVMLLTSDAPEYKPWALVIQDSNGENKIKMLSGGSGGSGGSTNLSDIIEKETGKQLVIQESILMLPEEVEEVIGNKPESDILVHTAYDESTDENVMLLTSDAPEYKPWALVIQDSNGENKIKMLSGGSKRTADGSEFEPKKKRKV

SEQ ID NO: 361 - protein, 1832 aa, Artificial Sequence
  Synthetic
MKRTADGSEFESPKKKRKVTDAEYVRIHEKLDIYTFKKQFFNNKKSVSHRCYVLFELKRRGERRACFWGYAVNKPQSGTERGIHAEIFSIRKVEEYLRDNPGQFTINWYSSWSPCADCAEKILEWYNQELRGNGHTLKIWACKLYYEKNARNQIGLWNLRDNGVGLNVMVSEHYQCCRKIFIQSSHNQLNENRWLEKTLKRAEKRRSELSIMIQVKILHTTKSPAVSGGSSGGSSGSETPGTSESATPESSGGSSGGSDKKYSIGLAIGTNSVGWAVITDEYKVPSKKFKVLGNTDRHSIKKNLIGALLFDSGETAEATRLKRTARRRYTRRKNRICYLQEIFSNEMAKVDDSFFHRLEESFLVEEDKKHERHPIFGNIVDEVAYHEKYPTIYHLRKKLVDSTDKADLRLIYLALAHMIKFRGHFLIEGDLNPDNSDVDKLFIQLVQTYNQLFEENPINASGVDAKAILSARLSKSRRLENLIAQLPGEKKNGLFGNLIALSLGLTPNFKSNFDLAEDAKLQLSKDTYDDDLDNLLAQIGDQYADLFLAAKNLSDAILLSDILRVNTEITKAPLSASMIKRYDEHHQDLTLLKALVRQQLPEKYKEIFFDQSKNGYAGYIDGGASQEEFYKFIKPILEKMDGTEELLVKLNREDLLRKQRTFDNGSIPHQIHLGELHAILRRQEDFYPFLKDNREKIEKILTFRIPYYVGPLARGNSRFAWMTRKSEETITPWNFEEVVDKGASAQSFIERMTNFDKNLPNEKVLPKHSLLYEYFTVYNELTKVKYVTEGMRKPAFLSGEQKKAIVDLLFKTNRKVTVKQLKEDYFKKIECFDSVEISGVEDRFNASLGTYHDLLKIIKDKDFLDNEENEDILEDIVLTLTLFEDREMIEERLKTYAHLFDDKVMKQLKRRRYTGWGRLSRKLINGIRDKQSGKTILDFLKSDGFANRNFMQLIHDDSLTFKEDIQKAQVSGQGDSLHEHIANLAGSPAIKKGILQTVKVVDELVKVMGRHKPENIVIEMARENQTTQKGQKNSRERMKRIEEGIKELGSQILKEHPVENTQLQNEKLYLYYLQNGRDMYVDQELDINRLSDYDVDHIVPQSFLKDDSIDNKVLTRSDKNRGKSDNVPSEEVVKKMKNYWRQLLNAKLITQRKFDNLTKAERGGLSELDKAGFIKRQLVETRQITKHVAQILDSRMNTKYDENDKLIREVKVITLKSKLVSDFRKDFQFYKVREINNYHHAHDAYLNAVVGTALIKKYPKLESEFVYGDYKVYDVRKMIAKSEQEIGKATAKYFFYSNIMNFFKTEITLANGEIRKRPLIETNGETGEIVWDKGRDFATVRKVLSMPQVNIVKKTEVQTGGFSKESILPKRNSDKLIARKKDWDPKKYGGFDSPTVAYSVLVVAKVEKGKSKKLKSVKELLGITIMERSSFEKNPIDFLEAKGYKEVKKDLIIKLPKYSLFELENGRKRMLASAGELQKGNELALPSKYVNFLYLASHYEKLKGSPEDNEQKQLFVEQHKHYLDEIIEQISEFSKRVILADANLDKVLSAYNKHRDKPIREQAENIIHLFTLTNLGAPAAFKYFDTTIDRKRYTSTKEVLDATLIHQSITGLYETRIDLSQLGGDSGGSGGSGGSTNLSDIIEKETGKQLVIQESILMLPEEVEEVIGNKPESDILVHTAYDESTDENVMLLTSDAPEYKPWALVIQDSNGENKIKMLSGGSGGSGGSTNLSDIIEKETGKQLVIQESILMLPEEVEEVIGNKPESDILVHTAYDESTDENVMLLTSDAPEYKPWALVIQDSNGENKIKMLSGGSKRTADGSEFEPKKKRKV

SEQ ID NO: 362 - protein, 1786 aa, Artificial Sequence
  Synthetic
MKRTADGSEFESPKKKRKVFERNYDPRELRKETYLLYEIKWGKSGKLWRHWCQNNRTQHAEVYFLENIFNARRFNPSTHCSITWYLSWSPCAECSQKIVDFLKEHPNVNLEIYVARLYYHEDERNRQGLRDLVNSGVTIRIMDLPDYNYCWKTFVSDQGGDEDYWPGHFAPWIKQYSLKLSGGSSGGSSGSETPGTSESATPESSGGSSGGSDKKYSIGLAIGTNSVGWAVITDEYKVPSKKFKVLGNTDRHSIKKNLIGALLFDSGETAEATRLKRTARRRYTRRKNRICYLQEIFSNEMAKVDDSFFHRLEESFLVEEDKKHERHPIFGNIVDEVAYHEKYPTIYHLRKKLVDSTDKADLRLIYLALAHMIKFRGHFLIEGDLNPDNSDVDKLFIQLVQTYNQLFEENPINASGVDAKAILSARLSKSRRLENLIAQLPGEKKNGLFGNLIALSLGLTPNFKSNFDLAEDAKLQLSKDTYDDDLDNLLAQIGDQYADLFLAAKNLSDAILLSDILRVNTEITKAPLSASMIKRYDEHHQDLTLLKALVRQQLPEKYKEIFFDQSKNGYAGYIDGGASQEEFYKFIKPILEKMDGTEELLVKLNREDLLRKQRTFDNGSIPHQIHLGELHAILRRQEDFYPFLKDNREKIEKILTFRIPYYVGPLARGNSRFAWMTRKSEETITPWNFEEVVDKGASAQSFIERMTNFDKNLPNEKVLPKHSLLYEYFTVYNELTKVKYVTEGMRKPAFLSGEQKKAIVDLLFKTNRKVTVKQLKEDYFKKIECFDSVEISGVEDRFNASLGTYHDLLKIIKDKDFLDNEENEDILEDIVLTLTLFEDREMIEERLKTYAHLFDDKVMKQLKRRRYTGWGRLSRKLINGIRDKQSGKTILDFLKSDGFANRNFMQLIHDDSLTFKEDIQKAQVSGQGDSLHEHIANLAGSPAIKKGILQTVKVVDELVKVMGRHKPENIVIEMARENQTTQKGQKNSRERMKRIEEGIKELGSQILKEHPVENTQLQNEKLYLYYLQNGRDMYVDQELDINRLSDYDVDHIVPQSFLKDDSIDNKVLTRSDKNRGKSDNVPSEEVVKKMKNYWRQLLNAKLITQRKFDNLTKAERGGLSELDKAGFIKRQLVETRQITKHVAQILDSRMNTKYDENDKLIREVKVITLKSKLVSDFRKDFQFYKVREINNYHHAHDAYLNAVVGTALIKKYPKLESEFVYGDYKVYDVRKMIAKSEQEIGKATAKYFFYSNIMNFFKTEITLANGEIRKRPLIETNGETGEIVWDKGRDFATVRKVLSMPQVNIVKKTEVQTGGFSKESILPKRNSDKLIARKKDWDPKKYGGFDSPTVAYSVLVVAKVEKGKSKKLKSVKELLGITIMERSSFEKNPIDFLEAKGYKEVKKDLIIKLPKYSLFELENGRKRMLASAGELQKGNELALPSKYVNFLYLASHYEKLKGSPEDNEQKQLFVEQHKHYLDEIIEQISEFSKRVILADANLDKVLSAYNKHRDKPIREQAENIIHLFTLTNLGAPAAFKYFDTTIDRKRYTSTKEVLDATLIHQSITGLYETRIDLSQLGGDSGGSGGSGGSTNLSDIIEKETGKQLVIQESILMLPEEVEEVIGNKPESDILVHTAYDESTDENVMLLTSDAPEYKPWALVIQDSNGENKIKMLSGGSGGSGGSTNLSDIIEKETGKQLVIQESILMLPEEVEEVIGNKPESDILVHTAYDESTDENVMLLTSDAPEYKPWALVIQDSNGENKIKMLSGGSKRTADGSEFEPKKKRKV

SEQ ID NO: 363 - protein, 1823 aa, Artificial Sequence
  Synthetic
MKRTADGSEFESPKKKRKVEASPASGPRHLMDPHIFTSNFNNGIGRHKTYLCYEVERLDNGTSVKMDQHRGFLHGQAKNLLCGFYGRHAELRFLDLVPSLQLDPAQIYRVTWFISWSPCFSWGCAGEVRAFLQENTHVRLRIFAARIYDYDPLYKEALQMLRDAGAQVSIMTYDEFKHCWDTFVDHQGCPFQPWDGLDEHSQALSGRLRAILQNQGNSGGSSGGSSGSETPGTSESATPESSGGSSGGSDKKYSIGLAIGTNSVGWAVITDEYKVPSKKFKVLGNTDRHSIKKNLIGALLFDSGETAEATRLKRTARRRYTRRKNRICYLQEIFSNEMAKVDDSFFHRLEESFLVEEDKKHERHPIFGNIVDEVAYHEKYPTIYHLRKKLVDSTDKADLRLIYLALAHMIKFRGHFLIEGDLNPDNSDVDKLFIQLVQTYNQLFEENPINASGVDAKAILSARLSKSRRLENLIAQLPGEKKNGLFGNLIALSLGLTPNFKSNFDLAEDAKLQLSKDTYDDDLDNLLAQIGDQYADLFLAAKNLSDAILLSDILRVNTEITKAPLSASMIKRYDEHHQDLTLLKALVRQQLPEKYKEIFFDQSKNGYAGYIDGGASQEEFYKFIKPILEKMDGTEELLVKLNREDLLRKQRTFDNGSIPHQIHLGELHAILRRQEDFYPFLKDNREKIEKILTFRIPYYVGPLARGNSRFAWMTRKSEETITPWNFEEVVDKGASAQSFIERMTNFDKNLPNEKVLPKHSLLYEYFTVYNELTKVKYVTEGMRKPAFLSGEQKKAIVDLLFKTNRKVTVKQLKEDYFKKIECFDSVEISGVEDRFNASLGTYHDLLKIIKDKDFLDNEENEDILEDIVLTLTLFEDREMIEERLKTYAHLFDDKVMKQLKRRRYTGWGRLSRKLINGIRDKQSGKTILDFLKSDGFANRNFMQLIHDDSLTFKEDIQKAQVSGQGDSLHEHIANLAGSPAIKKGILQTVKVVDELVKVMGRHKPENIVIEMARENQTTQKGQKNSRERMKRIEEGIKELGSQILKEHPVENTQLQNEKLYLYYLQNGRDMYVDQELDINRLSDYDVDHIVPQSFLKDDSIDNKVLTRSDKNRGKSDNVPSEEVVKKMKNYWRQLLNAKLITQRKFDNLTKAERGGLSELDKAGFIKRQLVETRQITKHVAQILDSRMNTKYDENDKLIREVKVITLKSKLVSDFRKDFQFYKVREINNYHHAHDAYLNAVVGTALIKKYPKLESEFVYGDYKVYDVRKMIAKSEQEIGKATAKYFFYSNIMNFFKTEITLANGEIRKRPLIETNGETGEIVWDKGRDFATVRKVLSMPQVNIVKKTEVQTGGFSKESILPKRNSDKLIARKKDWDPKKYGGFDSPTVAYSVLVVAKVEKGKSKKLKSVKELLGITIMERSSFEKNPIDFLEAKGYKEVKKDLIIKLPKYSLFELENGRKRMLASAGELQKGNELALPSKYVNFLYLASHYEKLKGSPEDNEQKQLFVEQHKHYLDEIIEQISEFSKRVILADANLDKVLSAYNKHRDKPIREQAENIIHLFTLTNLGAPAAFKYFDTTIDRKRYTSTKEVLDATLIHQSITGLYETRIDLSQLGGDSGGSGGSGGSTNLSDIIEKETGKQLVIQESILMLPEEVEEVIGNKPESDILVHTAYDESTDENVMLLTSDAPEYKPWALVIQDSNGENKIKMLSGGSGGSGGSTNLSDIIEKETGKQLVIQESILMLPEEVEEVIGNKPESDILVHTAYDESTDENVMLLTSDAPEYKPWALVIQDSNGENKIKMLSGGSKRTADGSEFEPKKKRKV

SEQ ID NO: 364 - protein, 1853 aa, Artificial Sequence
  Synthetic
MKRTADGSEFESPKKKRKVSSETGPVAVDPTLRRRIEPHEFEVFFDPRELAAETCLLYEINWGGRHSIWRHTSQNTNKHVEVNFIEKFTTERYFCPNTRCSITWFLSWSPCGECSRAITEFLSRYPHVTLFIYIARLYHLANPRNRQGLRDLISSGVTIQIMTEQESGYCWRNFVNYSPSNEAHWPRYPHLWVRLYVLELYCIILGLPPCLNILRRKQPQLTFFTIALQSCHYQRLPPHILWATGLKSGGSSGGSSGSETPGTSESATPESSGGSSGGSDKKYSIGLAIGTNSVGWAVITDEYKVPSKKFKVLGNTDRHSIKKNLIGALLFDSGETAEATRLKRTARRRYTRRKNRICYLQEIFSNEMAKVDDSFFHRLEESFLVEEDKKHERHPIFGNIVDEVAYHEKYPTIYHLRKKLVDSTDKADLRLIYLALAHMIKFRGHFLIEGDLNPDNSDVDKLFIQLVQTYNQLFEENPINASGVDAKAILSARLSKSRRLENLIAQLPGEKKNGLFGNLIALSLGLTPNFKSNFDLAEDAKLQLSKDTYDDDLDNLLAQIGDQYADLFLAAKNLSDAILLSDILRVNTEITKAPLSASMIKRYDEHHQDLTLLKALVRQQLPEKYKEIFFDQSKNGYAGYIDGGASQEEFYKFIKPILEKMDGTEELLVKLNREDLLRKQRTFDNGSIPHQIHLGELHAILRRQEDFYPFLKDNREKIEKILTFRIPYYVGPLARGNSRFAWMTRKSEETITPWNFEEVVDKGASAQSFIERMTNFDKNLPNEKVLPKHSLLYEYFTVYNELTKVKYVTEGMRKPAFLSGEQKKAIVDLLFKTNRKVTVKQLKEDYFKKIECFDSVEISGVEDRFNASLGTYHDLLKIIKDKDFLDNEENEDILEDIVLTLTLFEDREMIEERLKTYAHLFDDKVMKQLKRRRYTGWGRLSRKLINGIRDKQSGKTILDFLKSDGFANRNFMQLIHDDSLTFKEDIQKAQVSGQGDSLHEHIANLAGSPAIKKGILQTVKVVDELVKVMGRHKPENIVIEMARENQTTQKGQKNSRERMKRIEEGIKELGSQILKEHPVENTQLQNEKLYLYYLQNGRDMYVDQELDINRLSDYDVDHIVPQSFLKDDSIDNKVLTRSDKNRGKSDNVPSEEVVKKMKNYWRQLLNAKLITQRKFDNLTKAERGGLSELDKAGFIKRQLVETRQITKHVAQILDSRMNTKYDENDKLIREVKVITLKSKLVSDFRKDFQFYKVREINNYHHAHDAYLNAVVGTALIKKYPKLESEFVYGDYKVYDVRKMIAKSEQEIGKATAKYFFYSNIMNFFKTEITLANGEIRKRPLIETNGETGEIVWDKGRDFATVRKVLSMPQVNIVKKTEVQTGGFSKESILPKRNSDKLIARKKDWDPKKYGGFDSPTVAYSVLVVAKVEKGKSKKLKSVKELLGITIMERSSFEKNPIDFLEAKGYKEVKKDLIIKLPKYSLFELENGRKRMLASAGELQKGNELALPSKYVNFLYLASHYEKLKGSPEDNEQKQLFVEQHKHYLDEIIEQISEFSKRVILADANLDKVLSAYNKHRDKPIREQAENIIHLFTLTNLGAPAAFKYFDTTIDRKRYTSTKEVLDATLIHQSITGLYETRIDLSQLGGDSGGSGGSGGSTNLSDIIEKETGKQLVIQESILMLPEEVEEVIGNKPESDILVHTAYDESTDENVMLLTSDAPEYKPWALVIQDSNGENKIKMLSGGSGGSGGSTNLSDIIEKETGKQLVIQESILMLPEEVEEVIGNKPESDILVHTAYDESTDENVMLLTSDAPEYKPWALVIQDSNGENKIKMLSGGSKRTADGSEFEPKKKRKV

SEQ ID NO: 365 - protein, 1853 aa, Artificial Sequence
  Synthetic
MKRTADGSEFESPKKKRKVSSETGPVAVDPTLRRRIEPHEFEVFFDPRELRKETCLLYEINWGGRHSIWRHTSQNTNKHVEVNFIEKFTTERYFCPNTRCSITWFLSWSPCGECSRAITEFLSRYPHVTLFIYIARLYHHADPRNRQGLRDLISSGVTIQIMTEQESGYCWRNFVNYSPSNEAHWPRYPHLWVRLYVLELYCIILGLPPCLNILRRKQPQLTFFTIALQSCHYQRLPPHILWATGLKSGGSSGGSSGSETPGTSESATPESSGGSSGGSDKKYSIGLAIGTNSVGWAVITDEYKVPSKKFKVLGNTDRHSIKKNLIGALLFDSGETAEATRLKRTARRRYTRRKNRICYLQEIFSNEMAKVDDSFFHRLEESFLVEEDKKHERHPIFGNIVDEVAYHEKYPTIYHLRKKLVDSTDKADLRLIYLALAHMIKFRGHFLIEGDLNPDNSDVDKLFIQLVQTYNQLFEENPINASGVDAKAILSARLSKSRRLENLIAQLPGEKKNGLFGNLIALSLGLTPNFKSNFDLAEDAKLQLSKDTYDDDLDNLLAQIGDQYADLFLAAKNLSDAILLSDILRVNTEITKAPLSASMIKRYDEHHQDLTLLKALVRQQLPEKYKEIFFDQSKNGYAGYIDGGASQEEFYKFIKPILEKMDGTEELLVKLNREDLLRKQRTFDNGSIPHQIHLGELHAILRRQEDFYPFLKDNREKIEKILTFRIPYYVGPLARGNSRFAWMTRKSEETITPWNFEEVVDKGASAQSFIERMTNFDKNLPNEKVLPKHSLLYEYFTVYNELTKVKYVTEGMRKPAFLSGEQKKAIVDLLFKTNRKVTVKQLKEDYFKKIECFDSVEISGVEDRFNASLGTYHDLLKIIKDKDFLDNEENEDILEDIVLTLTLFEDREMIEERLKTYAHLFDDKVMKQLKRRRYTGWGRLSRKLINGIRDKQSGKTILDFLKSDGFANRNFMQLIHDDSLTFKEDIQKAQVSGQGDSLHEHIANLAGSPAIKKGILQTVKVVDELVKVMGRHKPENIVIEMARENQTTQKGQKNSRERMKRIEEGIKELGSQILKEHPVENTQLQNEKLYLYYLQNGRDMYVDQELDINRLSDYDVDHIVPQSFLKDDSIDNKVLTRSDKNRGKSDNVPSEEVVKKMKNYWRQLLNAKLITQRKFDNLTKAERGGLSELDKAGFIKRQLVETRQITKHVAQILDSRMNTKYDENDKLIREVKVITLKSKLVSDFRKDFQFYKVREINNYHHAHDAYLNAVVGTALIKKYPKLESEFVYGDYKVYDVRKMIAKSEQEIGKATAKYFFYSNIMNFFKTEITLANGEIRKRPLIETNGETGEIVWDKGRDFATVRKVLSMPQVNIVKKTEVQTGGFSKESIRPKRNSDKLIARKKDWDPKKYGGFVSPTVAYSVLVVAKVEKGKSKKLKSVKELLGITIMERSSFEKNPIDFLEAKGYKEVKKDLIIKLPKYSLFELENGRKRMLASARFLQKGNELALPSKYVNFLYLASHYEKLKGSPEDNEQKQLFVEQHKHYLDEIIEQISEFSKRVILADANLDKVLSAYNKHRDKPIREQAENIIHLFTLTNLGAPRAFKYFDTTIDRKVYRSTKEVLDATLIHQSITGLYETRIDLSQLGGDSGGSGGSGGSTNLSDIIEKETGKQLVIQESILMLPEEVEEVIGNKPESDILVHTAYDESTDENVMLLTSDAPEYKPWALVIQDSNGENKIKMLSGGSGGSGGSTNLSDIIEKETGKQLVIQESILMLPEEVEEVIGNKPESDILVHTAYDESTDENVMLLTSDAPEYKPWALVIQDSNGENKIKMLSGGSKRTADGSEFEPKKKRKV

SEQ ID NO: 366 - protein, 1710 aa, Artificial Sequence
  Synthetic
MSSETGPVAVDPTLRRRIEPHEFEVFFDPRELRKETCLLYEINWGGRHSIWRHTSQNTNKHVEVNFIEKFTTERYFCPNTRCSITWFLSWSPCGECSRAITEFLSRYPHVTLFIYIARLYHHADPRNRQGLRDLISSGVTIQIMTEQESGYCWRNFVNYSPSNEAHWPRYPHLWVRLYVLELYCLLLGLPPCLNILRRKQPQLTFFTIALQSCHYQRLPPHILWATGLKSGSETPGTSESATPESDKKYSIGLAIGTNSVGWAVITDEYKVPSKKFKVLGNTDRHSIKKNLIGALLFDSGETAEATRLKRTARRRYTRRKNRICYLQEIFSNEMAKVDDSFFHRLEESFLVEEDKKHERHPIFGNIVDEVAYHEKYPTIYHLRKKLVDSTDKADLRLIYLALAHMIKFRGHFLIEGDLNPDNSDVDKLFIQLVQTYNQLFEENPINASGVDAKAILSARLSKSRRLENLIAQLPGEKKNGLFGNLIALSLGLTPNFKSNFDLAEDAKLQLSKDTYDDDLDNLLAQIGDQYADLFLAAKNLSDAILLSDILRVNTEITKAPLSASMIKRYDEHHQDLTLLKALVRQQLPEKYKEIFFDQSKNGYAGYIDGGASQEEFYKFIKPILEKMDGTEELLVKLNREDLLRKQRTFDNGSIPHQIHLGELHAILRRQEDFYPFLKDNREKIEKILTFRIPYYVGPLARGNSRFAWMTRKSEETITPWNFEEVVDKGASAQSFIERMTNFDKNLPNEKVLPKHSLLYEYFTVYNELTKVKYVTEGMRKPAFLSGEQKKAIVDLLFKTNRKVTVKQLKEDYFKKIECFDSVEISGVEDRFNASLGTYHDLLKLLKDKDFLDNEENEDILEDIVLTLTLFEDREMIEERLKTYAHLFDDKVMKQLKRRRYTGWGRLSRKLINGIRDKQSGKTILDFLKSDGFANRNFMQLIHDDSLTFKEDIQKAQVSGQGDSLHEHIANLAGSPAIKKGILQTVKVVDELVKVMGRHKPENIVIEMARENQTTQKGQKNSRERMKRIEEGIKELGSQILKEHPVENTQLQNEKLYLYYLQNGRDMYVDQELDINRLSDYDVDHIVPQSFLKDDSIDNKVLTRSDKNRGKSDNVPSEEVVKKMKNYWRQLLNAKLITQRKFDNLTKAERGGLSELDKAGFIKRQLVETRQITKHVAQILDSRMNTKYDENDKLIREVKVITLKSKLVSDFRKDFQFYKVREINNYHHAHDAYLNAVVGTALIKKYPKLESEFVYGDYKVYDVRKMIAKSEQEIGKATAKYFFYSNIMNFFKTEITLANGEIRKRPLIETNGETGEIVWDKGRDFATVRKVLSMPQVNIVKKTEVQTGGFSKESILPKRNSDKLIARKKDWDPKKYGGFDSPTVAYSVLVVAKVEKGKSKKLKSVKELLGITIMERSSFEKNPIDFLEAKGYKEVKKDLLLKLPKYSLFELENGRKRMLASAGELQKGNELALPSKYVNFLYLASHYEKLKGSPEDNEQKQLFVEQHKHYLDELLEQISEFSKRVILADANLDKVLSAYNKHRDKPIREQAENLLHLFTLTNLGAPAAFKYFDTTIDRKRYTSTKEVLDATLIHQSITGLYETRIDLSQLGGDSGGSTNLSDLLEKETGKQLVIQESILMLPEEVEEVIGNKPESDILVHTAYDESTDENVMLLTSDAPEYKPWALVIQDSNGENKIKMLSGGSPKKKRKV

SEQ ID NO: 367 - protein, 1395 aa, Artificial Sequence
  Synthetic
MSSETGPVAVDPTLRRRIEPHEFEVFFDPRELRKETCLLYEINWGGRHSIWRHTSQNTNKHVEVNFIEKFTTERYFCPNTRCSITWFLSWSPCGECSRAITEFLSRYPHVTLFIYIARLYHHADPRNRQGLRDLISSGVTIQIMTEQESGYCWRNFVNYSPSNEAHWPRYPHLWVRLYVLELYCIILGLPPCLNILRRKQPQLTFFTIALQSCHYQRLPPHILWATGLKSGSETPGTSESATPESKRNYILGLDIGITSVGYGIIDYETRDVIDAGVRLFKEANVENNEGRRSKRGARRLKRRRRHRIQRVKKLLFDYNLLTDHSELSGINPYEARVKGLSQKLSEEEFSAALLHLAKRRGVHNVNEVEEDTGNELSTKEQISRNSKALEEKYVAELQLERLKKDGEVRGSINRFKTSDYVKEAKQLLKVQKAYHQLDQSFIDTYIDLLETRRTYYEGPGEGSPFGWKDIKEWYEMLMGHCTYFPEELRSVKYAYNADLYNALNDLNNLVITRDENEKLEYYEKFQIIENVFKQKKKPTLKQIAKEILVNEEDIKGYRVTSTGKPEFTNLKVYHDIKDITARKEIIENAELLDQIAKILTIYQSSEDIQEELTNLNSELTQEEIEQISNLKGYTGTHNLSLKAINLILDELWHTNDNQIAIFNRLKLVPKKVDLSQQKEIPTTLVDDFILSPVVKRSFIQSIKVINAIIKKYGLPNDIIIELAREKNSKDAQKMINEMQKRNRQTNERIEEIIRTTGKENAKYLIEKIKLHDMQEGKCLYSLEAIPLEDLLNNPFNYEVDHIIPRSVSFDNSFNNKVLVKQEEASKKGNRTPFQYLSSSDSKISYETFKKHILNLAKGKGRISKTKKEYLLEERDINRFSVQKDFINRNLVDTRYATRGLMNLLRSYFRVNNLDVKVKSINGGFTSFLRRKWKFKKERNKGYKHHAEDALIIANADFIFKEWKKLDKAKKVMENQMFEEKQAESMPEIETEQEYKEIFITPHQIKHIKDFKDYKYSHRVDKKPNRELINDTLYSTRKDDKGNTLIVNNLNGLYDKDNDKLKKLINKSPEKLLMYHHDPQTYQKLKLIMEQYGDEKNPLYKYYEETGNYLTKYSKKDNGPVIKKIKYYGNKLNAHLDITDDYPNSRNKVVKLSLKPYRFDVYLDNGVYKFVTVKNLDVIKKENYYEVNSKCYEEAKKLKKISNQAEFIASFYNNDLIKINGELYRVIGVNNDLLNRIEVNMIDITYREYLENMNDKRPPRIIKTIASKTQSIKKYSTDILGNLYEVKSKKHPQIIKKGSGGSTNLSDIIEKETGKQLVIQESILMLPEEVEEVIGNKPESDILVHTAYDESTDENVMLLTSDAPEYKPWALVIQDSNGENKIKMLSGGSPKKKRKV

SEQ ID NO: 368 - protein, 1804 aa, Artificial Sequence
  Synthetic
MDSLLMNRRKFLYQFKNVRWAKGRRETYLCYVVKRRDSATSFSLDFGYLRNKNGCHVELLFLRYISDWDLDPGRCYRVTWFTSWSPCYDCARHVADFLRGNPNLSLRIFTARLYFCEDRKAEPEGLRRLHRAGVQIAIMTFKDYFYCWNTFVENHERTFKAWEGLHENSVRLSRQLRRILLPLYEVDDLRDAFRTLGLSGGSSGGSSGSETPGTSESATPESSGGSSGGSDKKYSIGLAIGTNSVGWAVITDEYKVPSKKFKVLGNTDRHSIKKNLIGALLFDSGETAEATRLKRTARRRYTRRKNRICYLQEIFSNEMAKVDDSFFHRLEESFLVEEDKKHERHPIFGNIVDEVAYHEKYPTIYHLRKKLVDSTDKADLRLIYLALAHMIKFRGHFLIEGDLNPDNSDVDKLFIQLVQTYNQLFEENPINASGVDAKAILSARLSKSRRLENLIAQLPGEKKNGLFGNLIALSLGLTPNFKSNFDLAEDAKLQLSKDTYDDDLDNLLAQIGDQYADLFLAAKNLSDAILLSDILRVNTEITKAPLSASMIKRYDEHHQDLTLLKALVRQQLPEKYKEIFFDQSKNGYAGYIDGGASQEEFYKFIKPILEKMDGTEELLVKLNREDLLRKQRTFDNGSIPHQIHLGELHAILRRQEDFYPFLKDNREKIEKILTFRIPYYVGPLARGNSRFAWMTRKSEETITPWNFEEVVDKGASAQSFIERMTNFDKNLPNEKVLPKHSLLYEYFTVYNELTKVKYVTEGMRKPAFLSGEQKKAIVDLLFKTNRKVTVKQLKEDYFKKIECFDSVEISGVEDRFNASLGTYHDLLKIIKDKDFLDNEENEDILEDIVLTLTLFEDREMIEERLKTYAHLFDDKVMKQLKRRRYTGWGRLSRKLINGIRDKQSGKTILDFLKSDGFANRNFMQLIHDDSLTFKEDIQKAQVSGQGDSLHEHIANLAGSPAIKKGILQTVKVVDELVKVMGRHKPENIVIEMARENQTTQKGQKNSRERMKRIEEGIKELGSQILKEHPVENTQLQNEKLYLYYLQNGRDMYVDQELDINRLSDYDVDHIVPQSFLKDDSIDNKVLTRSDKNRGKSDNVPSEEVVKKMKNYWRQLLNAKLITQRKFDNLTKAERGGLSELDKAGFIKRQLVETRQITKHVAQILDSRMNTKYDENDKLIREVKVITLKSKLVSDFRKDFQFYKVREINNYHHAHDAYLNAVVGTALIKKYPKLESEFVYGDYKVYDVRKMIAKSEQEIGKATAKYFFYSNIMNFFKTEITLANGEIRKRPLIETNGETGEIVWDKGRDFATVRKVLSMPQVNIVKKTEVQTGGFSKESILPKRNSDKLIARKKDWDPKKYGGFVSPTVAYSVLVVAKVEKGKSKKLKSVKELLGITIMERSSFEKNPIDFLEAKGYKEVKKDLIIKLPKYSLFELENGRKRMLASARELQKGNELALPSKYVNFLYLASHYEKLKGSPEDNEQKQLFVEQHKHYLDEIIEQISEFSKRVILADANLDKVLSAYNKHRDKPIREQAENIIHLFTLTNLGAPAAFKYFDTTIDRKQYRSTKEVLDATLIHQSITGLYETRIDLSQLGGDSGGSGGSGGSTNLSDIIEKETGKQLVIQESILMLPEEVEEVIGNKPESDILVHTAYDESTDENVMLLTSDAPEYKPWALVIQDSNGENKIKMLSGGSGGSGGSTNLSDIIEKETGKQLVIQESILMLPEEVEEVIGNKPESDILVHTAYDESTDENVMLLTSDAPEYKPWALVIQDSNGENKIKMLSGGSKRTADGSEFEPKKKRKV

SEQ ID NO: 369 - protein, 1539 aa, Artificial Sequence
  Synthetic
MKRTADGSEFESPKKKRKVSSETGPVAVDPTLRRRIEPHEFEVFFDPRELRKETCLLYEINWGGRHSIWRHTSQNTNKHVEVNFIEKFTTERYFCPNTRCSITWFLSWSPCGECSRAITEFLSRYPHVTLFIYIARLYHHADPRNRQGLRDLISSGVTIQIMTEQESGYCWRNFVNYSPSNEAHWPRYPHLWVRLYVLELYCIILGLPPCLNILRRKQPQLTFFTIALQSCHYQRLPPHILWATGLKSGGSSGGSSGSETPGTSESATPESSGGSSGGSGKRNYILGLAIGITSVGYGIIDYETRDVIDAGVRLFKEANVENNEGRRSKRGARRLKRRRRHRIQRVKKLLFDYNLLTDHSELSGINPYEARVKGLSQKLSEEEFSAALLHLAKRRGVHNVNEVEEDTGNELSTKEQISRNSKALEEKYVAELQLERLKKDGEVRGSINRFKTSDYVKEAKQLLKVQKAYHQLDQSFIDTYIDLLETRRTYYEGPGEGSPFGWKDIKEWYEMLMGHCTYFPEELRSVKYAYNADLYNALNDLNNLVITRDENEKLEYYEKFQIIENVFKQKKKPTLKQIAKEILVNEEDIKGYRVTSTGKPEFTNLKVYHDIKDITARKEIIENAELLDQIAKILTIYQSSEDIQEELTNLNSELTQEEIEQISNLKGYTGTHNLSLKAINLILDELWHTNDNQIAIFNRLKLVPKKVDLSQQKEIPTTLVDDFILSPVVKRSFIQSIKVINAIIKKYGLPNDIIIELAREKNSKDAQKMINEMQKRNRQTNERIEEIIRTTGKENAKYLIEKIKLHDMQEGKCLYSLEAIPLEDLLNNPFNYEVDHIIPRSVSFDNSFNNKVLVKQEENSKKGNRTPFQYLSSSDSKISYETFKKHILNLAKGKGRISKTKKEYLLEERDINRFSVQKDFINRNLVDTRYATRGLMNLLRSYFRVNNLDVKVKSINGGFTSFLRRKWKFKKERNKGYKHHAEDALIIANADFIFKEWKKLDKAKKVMENQMFEEKQAESMPEIETEQEYKEIFITPHQIKHIKDFKDYKYSHRVDKKPNRKLINDTLYSTRKDDKGNTLIVNNLNGLYDKDNDKLKKLINKSPEKLLMYHHDPQTYQKLKLIMEQYGDEKNPLYKYYEETGNYLTKYSKKDNGPVIKKIKYYGNKLNAHLDITDDYPNSRNKVVKLSLKPYRFDVYLDNGVYKFVTVKNLDVIKKENYYEVNSKCYEEAKKLKKISNQAEFIASFYKNDLIKINGELYRVIGVNNDLLNRIEVNMIDITYREYLENMNDKRPPHIIKTIASKTQSIKKYSTDILGNLYEVKSKKHPQIIKKGSGGSGGSGGSTNLSDIIEKETGKQLVIQESILMLPEEVEEVIGNKPESDILVHTAYDESTDENVMLLTSDAPEYKPWALVIQDSNGENKIKMLSGGSGGSGGSTNLSDIIEKETGKQLVIQESILMLPEEVEEVIGNKPESDILVHTAYDESTDENVMLLTSDAPEYKPWALVIQDSNGENKIKMLSGGSKRTADGSEFEPKKKRKV

SEQ ID NO: 370 - protein, 1853 aa, Artificial Sequence
  Synthetic
MKRTADGSEFESPKKKRKVSSETGPVAVDPTLRRRIEPHEFEVFFDPRELRKETCLLYEINWGGRHSIWRHTSQNTNKHVEVNFIEKFTTERYFCPNTRCSITWFLSWSPCGECSRAITEFLSRYPHVTLFIYIARLYHHADPRNRQGLRDLISSGVTIQIMTEQESGYCWRNFVNYSPSNEAHWPRYPHLWVRLYVLELYCIILGLPPCLNILRRKQPQLTFFTIALQSCHYQRLPPHILWATGLKSGGSSGGSSGSETPGTSESATPESSGGSSGGSDKKYSIGLTIGTNSVGWAVITDEYKVPSKKFKVLGNTDRHSIKKNLIGALLFDSGETAEATRLKRTARRRYTRRKNRICYLQEIFSNEMAKVDDSFFHRLEESFLVEEDKKHERHPIFGNIVDEVAYHEKYPTIYHLRKKLVDSTDKADLRLIYLALAHMIKFRGHFLIEGDLNPDNSDVDKLFIQLVQTYNQLFEENPINASGVDAKAILSARLSKSRRLENLIAQLPGEKKNGLFGNLIALSLGLTPNFKSNFDLAEDAKLQLSKDTYDDDLDNLLAQIGDQYADLFLAAKNLSDAILLSDILRVNTEITKAPLSASMVKRYDEHHQDLTLLKALVRQQLPEKYKEIFFDQSKNGYAGYIDGGASQEEFYKFIKPILEKMDGTEELLVKLNREDLLRKQRTFDNGIIPHQIHLGELHAILRRQGDFYPFLKDNREKIEKILTFRIPYYVGPLARGNSRFAWMTRKSEETITPWNFEEVVDKGASAQSFIERMTNFDKNLPNEKVLPKHSLLYEYFTVYNELTKVKYVTEGMRKPAFLSGEQKKAIVDLLFKTNRKVTVKQLKEDYFKKIECFDSVEISGVEDRFNASLGTYHDLLKIIKDKDFLDNEENEDILEDIVLTLTLFEDREMIEERLKTYAHLFDDKVMKQLKRLRYTGWGRLSRKLINGIRDKQSGKTILDFLKSDGFANRNFMQLIHDDSLTFKEDIQKAQVSGQGDSLHEHIANLAGSPAIKKGILQTVKVVDELVKVMGGHKPENIVIEMARENQTTQKGQKNSRERMKRIEEGIKELGSQILKEHPVENTQLQNEKLYLYYLQNGRDMYVDQELDINRLSDYDVDHIVPQSFLKDDSIDNKVLTRSDKNRGKSDNVPSEEVVKKMKNYWRQLLNAKLITQRKFDNLTKAERGGLSELDKAGFIKRQLVETRQITKHVAQILDSRMNTKYDENDKLIREVKVITLKSKLVSDFRKDFQFYKVREINNYHHAHDAYLNAVVGTALIKKYPKLESEFVYGDYKVYDVRKMIAKSEQEIGKATAKYFFYSNIMNFFKTEITLANGEIRKRPLIETNGETGEIVWDKGRDFATVRKVLSMPQVNIVKKTEVQTGGFSKESILPKGNSDKLIARKKDWDPKKYGGFNSPTAAYSVLVVAKVEKGKSKKLKSVKELLGITIMERSSFEKNPIGFLEAKGYKEVKKDLIIKLPKYSLFELENGRKRMLASAGVLHKGNELALPSKYVNFLYLASHYEKLKGSPEDNEQKQLFVEQHKHYLDEIIEQISEFSKRVILADANLDKVLSAYNKHRDKPIREQAENIIHLFTLTNLGVPAAFKYFDTTIDKKRYTSTKEVLDATLIHQSITGLYETRIDLSQLGGDSGGSGGSGGSTNLSDIIEKETGKQLVIQESILMLPEEVEEVIGNKPESDILVHTAYDESTDENVMLLTSDAPEYKPWALVIQDSNGENKIKMLSGGSGGSGGSTNLSDIIEKETGKQLVIQESILMLPEEVEEVIGNKPESDILVHTAYDESTDENVMLLTSDAPEYKPWALVIQDSNGENKIKMLSGGSKRTADGSEFEPKKKRKV

SEQ ID NO: 371 - protein, 1853 aa, Artificial Sequence
  Synthetic
MKRTADGSEFESPKKKRKVSSETGPVAVDPTLRRRIEPHEFEVFFDPRELRKETCLLYEINWGGRHSIWRHTSQNTNKHVEVNFIEKFTTERYFCPNTRCSITWFLSWSPCGECSRAITEFLSRYPHVTLFIYIARLYHHADPRNRQGLRDLISSGVTIQIMTEQESGYCWRNFVNYSPSNEAHWPRYPHLWVRLYVLELYCIILGLPPCLNILRRKQPQLTFFTIALQSCHYQRLPPHILWATGLKSGGSSGGSSGSETPGTSESATPESSGGSSGGSDKKYSIGLAIGTNSVGWAVITDEYKVPSKKFKVLGNTDRHSIKKNLIGALLFDSGETAEATRLKRTARRRYTRRKNRICYLQEIFSNEMAKVDDSFFHRLEESFLVEEDKKHERHPIFGNIVDEVAYHEKYPTIYHLRKKLVDSTDKADLRLIYLALAHMIKFRGHFLIEGDLNPDNSDVDKLFIQLVQTYNQLFEENPINASGVDAKAILSARLSKSRRLENLIAQLPGEKKNGLFGNLIALSLGLTPNFKSNFDLAEDAKLQLSKDTYDDDLDNLLAQIGDQYADLFLAAKNLSDAILLSDILRVNTEITKAPLSASMIKRYDEHHQDLTLLKALVRQQLPEKYKEIFFDQSKNGYAGYIDGGASQEEFYKFIKPILEKMDGTEELLVKLNREDLLRKQRTFDNGSIPHQIHLGELHAILRRQEDFYPFLKDNREKIEKILTFRIPYYVGPLARGNSRFAWMTRKSEETITPWNFEEVVDKGASAQSFIERMTNFDKNLPNEKVLPKHSLLYEYFTVYNELTKVKYVTEGMRKPAFLSGEQKKAIVDLLFKTNRKVTVKQLKEDYFKKIECFDSVEISGVEDRFNASLGTYHDLLKIIKDKDFLDNEENEDILEDIVLTLTLFEDREMIEERLKTYAHLFDDKVMKQLKRRRYTGWGRLSRKLINGIRDKQSGKTILDFLKSDGFANRNFMQLIHDDSLTFKEDIQKAQVSGQGDSLHEHIANLAGSPAIKKGILQTVKVVDELVKVMGRHKPENIVIEMARENQTTQKGQKNSRERMKRIEEGIKELGSQILKEHPVENTQLQNEKLYLYYLQNGRDMYVDQELDINRLSDYDVDHIVPQSFLKDDSIDNKVLTRSDKNRGKSDNVPSEEVVKKMKNYWRQLLNAKLITQRKFDNLTKAERGGLSELDKAGFIKRQLVETRQITKHVAQILDSRMNTKYDENDKLIREVKVITLKSKLVSDFRKDFQFYKVREINNYHHAHDAYLNAVVGTALIKKYPKLESEFVYGDYKVYDVRKMIAKSEQEIGKATAKYFFYSNIMNFFKTEITLANGEIRKRPLIETNGETGEIVWDKGRDFATVRKVLSMPQVNIVKKTEVQTGGFSKESILPKRNSDKLIARKKDWDPKKYGGFVSPTVAYSVLVVAKVEKGKSKKLKSVKELLGITIMERSSFEKNPIDFLEAKGYKEVKKDLIIKLPKYSLFELENGRKRMLASAGELQKGNELALPSKYVNFLYLASHYEKLKGSPEDNEQKQLFVEQHKHYLDEIIEQISEFSKRVILADANLDKVLSAYNKHRDKPIREQAENIIHLFTLTNLGAPAAFKYFDTTIDRKQYRSTKEVLDATLIHQSITGLYETRIDLSQLGGDSGGSGGSGGSTNLSDIIEKETGKQLVIQESILMLPEEVEEVIGNKPESDILVHTAYDESTDENVMLLTSDAPEYKPWALVIQDSNGENKIKMLSGGSGGSGGSTNLSDIIEKETGKQLVIQESILMLPEEVEEVIGNKPESDILVHTAYDESTDENVMLLTSDAPEYKPWALVIQDSNGENKIKMLSGGSKRTADGSEFEPKKKRKV

SEQ ID NO: 372 - protein, 1853 aa, Artificial Sequence
  Synthetic
MKRTADGSEFESPKKKRKVSSETGPVAVDPTLRRRIEPHEFEVFFDPRELRKETCLLYEINWGGRHSIWRHTSQNTNKHVEVNFIEKFTTERYFCPNTRCSITWFLSWSPCGECSRAITEFLSRYPHVTLFIYIARLYHHADPRNRQGLRDLISSGVTIQIMTEQESGYCWRNFVNYSPSNEAHWPRYPHLWVRLYVLELYCIILGLPPCLNILRRKQPQLTFFTIALQSCHYQRLPPHILWATGLKSGGSSGGSSGSETPGTSESATPESSGGSSGGSDKKYSIGLAIGTNSVGWAVITDEYKVPSKKFKVLGNTDRHSIKKNLIGALLFDSGETAEATRLKRTARRRYTRRKNRICYLQEIFSNEMAKVDDSFFHRLEESFLVEEDKKHERHPIFGNIVDEVAYHEKYPTIYHLRKKLVDSTDKADLRLIYLALAHMIKFRGHFLIEGDLNPDNSDVDKLFIQLVQTYNQLFEENPINASGVDAKAILSARLSKSRRLENLIAQLPGEKKNGLFGNLIALSLGLTPNFKSNFDLAEDAKLQLSKDTYDDDLDNLLAQIGDQYADLFLAAKNLSDAILLSDILRVNTEITKAPLSASMIKRYDEHHQDLTLLKALVRQQLPEKYKEIFFDQSKNGYAGYIDGGASQEEFYKFIKPILEKMDGTEELLVKLNREDLLRKQRTFDNGSIPHQIHLGELHAILRRQEDFYPFLKDNREKIEKILTFRIPYYVGPLARGNSRFAWMTRKSEETITPWNFEEVVDKGASAQSFIERMTNFDKNLPNEKVLPKHSLLYEYFTVYNELTKVKYVTEGMRKPAFLSGEQKKAIVDLLFKTNRKVTVKQLKEDYFKKIECFDSVEISGVEDRFNASLGTYHDLLKIIKDKDFLDNEENEDILEDIVLTLTLFEDREMIEERLKTYAHLFDDKVMKQLKRRRYTGWGRLSRKLINGIRDKQSGKTILDFLKSDGFANRNFMQLIHDDSLTFKEDIQKAQVSGQGDSLHEHIANLAGSPAIKKGILQTVKVVDELVKVMGRHKPENIVIEMARENQTTQKGQKNSRERMKRIEEGIKELGSQILKEHPVENTQLQNEKLYLYYLQNGRDMYVDQELDINRLSDYDVDHIVPQSFLKDDSIDNKVLTRSDKNRGKSDNVPSEEVVKKMKNYWRQLLNAKLITQRKFDNLTKAERGGLSELDKAGFIKRQLVETRQITKHVAQILDSRMNTKYDENDKLIREVKVITLKSKLVSDFRKDFQFYKVREINNYHHAHDAYLNAVVGTALIKKYPKLESEFVYGDYKVYDVRKMIAKSEQEIGKATAKYFFYSNIMNFFKTEITLANGEIRKRPLIETNGETGEIVWDKGRDFATVRKVLSMPQVNIVKKTEVQTGGFSKESILPKRNSDKLIARKKDWDPKKYGGFVSPTVAYSVLVVAKVEKGKSKKLKSVKELLGITIMERSSFEKNPIDFLEAKGYKEVKKDLIIKLPKYSLFELENGRKRMLASARELQKGNELALPSKYVNFLYLASHYEKLKGSPEDNEQKQLFVEQHKHYLDEIIEQISEFSKRVILADANLDKVLSAYNKHRDKPIREQAENIIHLFTLTNLGAPAAFKYFDTTIDRKQYRSTKEVLDATLIHQSITGLYETRIDLSQLGGDSGGSGGSGGSTNLSDIIEKETGKQLVIQESILMLPEEVEEVIGNKPESDILVHTAYDESTDENVMLLTSDAPEYKPWALVIQDSNGENKIKMLSGGSGGSGGSTNLSDIIEKETGKQLVIQESILMLPEEVEEVIGNKPESDILVHTAYDESTDENVMLLTSDAPEYKPWALVIQDSNGENKIKMLSGGSKRTADGSEFEPKKKRKV

SEQ ID NO: 373 - protein, 1561 aa, Artificial Sequence
  Synthetic
MSEVEFSHEYWMRHALTLAKRAWDEREVPVGAVLVHNNRVIGEGWNRPIGRHDPTAHAEIMALRQGGLVMQNYRLIDATLYVTLEPCVMCAGAMIHSRIGRVVFGARDAKTGAAGSLMDVLHHPGMNHRVEITEGILADECAALLSDFFRMRRQEIKAQKKAQSSTDSGSETPGTSESATPESDKKYSIGLAIGTNSVGWAVITDEYKVPSKKFKVLGNTDRHSIKKNLIGALLFDSGETAEATRLKRTARRRYTRRKNRICYLQEIFSNEMAKVDDSFFHRLEESFLVEEDKKHERHPIFGNIVDEVAYHEKYPTIYHLRKKLVDSTDKADLRLIYLALAHMIKFRGHFLIEGDLNPDNSDVDKLFIQLVQTYNQLFEENPINASGVDAKAILSARLSKSRRLENLIAQLPGEKKNGLFGNLIALSLGLTPNFKSNFDLAEDAKLQLSKDTYDDDLDNLLAQIGDQYADLFLAAKNLSDAILLSDILRVNTEITKAPLSASMIKRYDEHHQDLTLLKALVRQQLPEKYKEIFFDQSKNGYAGYIDGGASQEEFYKFIKPILEKMDGTEELLVKLNREDLLRKQRTFDNGSIPHQIHLGELHAILRRQEDFYPFLKDNREKIEKILTFRIPYYVGPLARGNSRFAWMTRKSEETITPWNFEEVVDKGASAQSFIERMTNFDKNLPNEKVLPKHSLLYEYFTVYNELTKVKYVTEGMRKPAFLSGEQKKAIVDLLFKTNRKVTVKQLKEDYFKKIECFDSVEISGVEDRFNASLGTYHDLLKIIKDKDFLDNEENEDILEDIVLTLTLFEDREMIEERLKTYAHLFDDKVMKQLKRRRYTGWGRLSRKLINGIRDKQSGKTILDFLKSDGFANRNFMQLIHDDSLTFKEDIQKAQVSGQGDSLHEHIANLAGSPAIKKGILQTVKVVDELVKVMGRHKPENIVIEMARENQTTQKGQKNSRERMKRIEEGIKELGSQILKEHPVENTQLQNEKLYLYYLQNGRDMYVDQELDINRLSDYDVDHIVPQSFLKDDSIDNKVLTRSDKNRGKSDNVPSEEVVKKMKNYWRQLLNAKLITQRKFDNLTKAERGGLSELDKAGFIKRQLVETRQITKHVAQILDSRMNTKYDENDKLIREVKVITLKSKLVSDFRKDFQFYKVREINNYHHAHDAYLNAVVGTALIKKYPKLESEFVYGDYKVYDVRKMIAKSEQEIGKATAKYFFYSNIMNFFKTEITLANGEIRKRPLIETNGETGEIVWDKGRDFATVRKVLSMPQVNIVKKTEVQTGGFSKESILPKRNSDKLIARKKDWDPKKYGGFDSPTVAYSVLVVAKVEKGKSKKLKSVKELLGITIMERSSFEKNPIDFLEAKGYKEVKKDLIIKLPKYSLFELENGRKRMLASAGELQKGNELALPSKYVNFLYLASHYEKLKGSPEDNEQKQLFVEQHKHYLDEIIEQISEFSKRVILADANLDKVLSAYNKHRDKPIREQAENIIHLFTLTNLGAPAAFKYFDTTIDRKRYTSTKEVLDATLIHQSITGLYETRIDLSQLGGDSGGSPKKKRKV

SEQ ID NO: 374 - protein, 1561 aa, Artificial Sequence
  Synthetic
MSEVEFSHEYWMRHALTLAKRAWDEREVPVGAVLVHNNRVIGEGWNRPIGRHDPTAHAEIMALRQGGLVMQNYRLIDATLYVTLEPCVMCAGAMIHSRIGRVVFGARNAKTGAAGSLMDVLHHPGMNHRVEITEGILADECAALLSDFFRMRRQEIKAQKKAQSSTDSGSETPGTSESATPESDKKYSIGLAIGTNSVGWAVITDEYKVPSKKFKVLGNTDRHSIKKNLIGALLFDSGETAEATRLKRTARRRYTRRKNRICYLQEIFSNEMAKVDDSFFHRLEESFLVEEDKKHERHPIFGNIVDEVAYHEKYPTIYHLRKKLVDSTDKADLRLIYLALAHMIKFRGHFLIEGDLNPDNSDVDKLFIQLVQTYNQLFEENPINASGVDAKAILSARLSKSRRLENLIAQLPGEKKNGLFGNLIALSLGLTPNFKSNFDLAEDAKLQLSKDTYDDDLDNLLAQIGDQYADLFLAAKNLSDAILLSDILRVNTEITKAPLSASMIKRYDEHHQDLTLLKALVRQQLPEKYKEIFFDQSKNGYAGYIDGGASQEEFYKFIKPILEKMDGTEELLVKLNREDLLRKQRTFDNGSIPHQIHLGELHAILRRQEDFYPFLKDNREKIEKILTFRIPYYVGPLARGNSRFAWMTRKSEETITPWNFEEVVDKGASAQSFIERMTNFDKNLPNEKVLPKHSLLYEYFTVYNELTKVKYVTEGMRKPAFLSGEQKKAIVDLLFKTNRKVTVKQLKEDYFKKIECFDSVEISGVEDRFNASLGTYHDLLKIIKDKDFLDNEENEDILEDIVLTLTLFEDREMIEERLKTYAHLFDDKVMKQLKRRRYTGWGRLSRKLINGIRDKQSGKTILDFLKSDGFANRNFMQLIHDDSLTFKEDIQKAQVSGQGDSLHEHIANLAGSPAIKKGILQTVKVVDELVKVMGRHKPENIVIEMARENQTTQKGQKNSRERMKRIEEGIKELGSQILKEHPVENTQLQNEKLYLYYLQNGRDMYVDQELDINRLSDYDVDHIVPQSFLKDDSIDNKVLTRSDKNRGKSDNVPSEEVVKKMKNYWRQLLNAKLITQRKFDNLTKAERGGLSELDKAGFIKRQLVETRQITKHVAQILDSRMNTKYDENDKLIREVKVITLKSKLVSDFRKDFQFYKVREINNYHHAHDAYLNAVVGTALIKKYPKLESEFVYGDYKVYDVRKMIAKSEQEIGKATAKYFFYSNIMNFFKTEITLANGEIRKRPLIETNGETGEIVWDKGRDFATVRKVLSMPQVNIVKKTEVQTGGFSKESILPKRNSDKLIARKKDWDPKKYGGFDSPTVAYSVLVVAKVEKGKSKKLKSVKELLGITIMERSSFEKNPIDFLEAKGYKEVKKDLIIKLPKYSLFELENGRKRMLASAGELQKGNELALPSKYVNFLYLASHYEKLKGSPEDNEQKQLFVEQHKHYLDEIIEQISEFSKRVILADANLDKVLSAYNKHRDKPIREQAENIIHLFTLTNLGAPAAFKYFDTTIDRKRYTSTKEVLDATLIHQSITGLYETRIDLSQLGGDSGGSPKKKRKV

SEQ ID NO: 375 - protein, 1561 aa, Artificial Sequence
  Synthetic
MSEVEFSHEYWMRHALTLAKRAWDEREVPVGAVLVHNNRVIGEGWNRPIGRHDPTAHAEIMALRQGGLVMQNYRLIDATLYVTLEPCVMCAGAMIHSRIGRVVFGARGAKTGAAGSLMDVLHHPGMNHRVEITEGILADECAALLSDFFRMRRQEIKAQKKAQSSTDSGSETPGTSESATPESDKKYSIGLAIGTNSVGWAVITDEYKVPSKKFKVLGNTDRHSIKKNLIGALLFDSGETAEATRLKRTARRRYTRRKNRICYLQEIFSNEMAKVDDSFFHRLEESFLVEEDKKHERHPIFGNIVDEVAYHEKYPTIYHLRKKLVDSTDKADLRLIYLALAHMIKFRGHFLIEGDLNPDNSDVDKLFIQLVQTYNQLFEENPINASGVDAKAILSARLSKSRRLENLIAQLPGEKKNGLFGNLIALSLGLTPNFKSNFDLAEDAKLQLSKDTYDDDLDNLLAQIGDQYADLFLAAKNLSDAILLSDILRVNTEITKAPLSASMIKRYDEHHQDLTLLKALVRQQLPEKYKEIFFDQSKNGYAGYIDGGASQEEFYKFIKPILEKMDGTEELLVKLNREDLLRKQRTFDNGSIPHQIHLGELHAILRRQEDFYPFLKDNREKIEKILTFRIPYYVGPLARGNSRFAWMTRKSEETITPWNFEEVVDKGASAQSFIERMTNFDKNLPNEKVLPKHSLLYEYFTVYNELTKVKYVTEGMRKPAFLSGEQKKAIVDLLFKTNRKVTVKQLKEDYFKKIECFDSVEISGVEDRFNASLGTYHDLLKIIKDKDFLDNEENEDILEDIVLTLTLFEDREMIEERLKTYAHLFDDKVMKQLKRRRYTGWGRLSRKLINGIRDKQSGKTILDFLKSDGFANRNFMQLIHDDSLTFKEDIQKAQVSGQGDSLHEHIANLAGSPAIKKGILQTVKVVDELVKVMGRHKPENIVIEMARENQTTQKGQKNSRERMKRIEEGIKELGSQILKEHPVENTQLQNEKLYLYYLQNGRDMYVDQELDINRLSDYDVDHIVPQSFLKDDSIDNKVLTRSDKNRGKSDNVPSEEVVKKMKNYWRQLLNAKLITQRKFDNLTKAERGGLSELDKAGFIKRQLVETRQITKHVAQILDSRMNTKYDENDKLIREVKVITLKSKLVSDFRKDFQFYKVREINNYHHAHDAYLNAVVGTALIKKYPKLESEFVYGDYKVYDVRKMIAKSEQEIGKATAKYFFYSNIMNFFKTEITLANGEIRKRPLIETNGETGEIVWDKGRDFATVRKVLSMPQVNIVKKTEVQTGGFSKESILPKRNSDKLIARKKDWDPKKYGGFDSPTVAYSVLVVAKVEKGKSKKLKSVKELLGITIMERSSFEKNPIDFLEAKGYKEVKKDLIIKLPKYSLFELENGRKRMLASAGELQKGNELALPSKYVNFLYLASHYEKLKGSPEDNEQKQLFVEQHKHYLDEIIEQISEFSKRVILADANLDKVLSAYNKHRDKPIREQAENIIHLFTLTNLGAPAAFKYFDTTIDRKRYTSTKEVLDATLIHQSITGLYETRIDLSQLGGDSGGSPKKKRKV

SEQ ID NO: 376 - protein, 1561 aa, Artificial Sequence
  Synthetic
MSEVEFSHEYWMRHALTLAKRAWDEREVPVGAVLVHNNRVIGEGWNRPIGRHDPTAHAEIMALRQGGLVMQNYRLIDATLYVTLEPCVMCAGAMIHSRIGRVVFGARVAKTGAAGSLMDVLHHPGMNHRVEITEGILADECAALLSDFFRMRRQEIKAQKKAQSSTDSGSETPGTSESATPESDKKYSIGLAIGTNSVGWAVITDEYKVPSKKFKVLGNTDRHSIKKNLIGALLFDSGETAEATRLKRTARRRYTRRKNRICYLQEIFSNEMAKVDDSFFHRLEESFLVEEDKKHERHPIFGNIVDEVAYHEKYPTIYHLRKKLVDSTDKADLRLIYLALAHMIKFRGHFLIEGDLNPDNSDVDKLFIQLVQTYNQLFEENPINASGVDAKAILSARLSKSRRLENLIAQLPGEKKNGLFGNLIALSLGLTPNFKSNFDLAEDAKLQLSKDTYDDDLDNLLAQIGDQYADLFLAAKNLSDAILLSDILRVNTEITKAPLSASMIKRYDEHHQDLTLLKALVRQQLPEKYKEIFFDQSKNGYAGYIDGGASQEEFYKFIKPILEKMDGTEELLVKLNREDLLRKQRTFDNGSIPHQIHLGELHAILRRQEDFYPFLKDNREKIEKILTFRIPYYVGPLARGNSRFAWMTRKSEETITPWNFEEVVDKGASAQSFIERMTNFDKNLPNEKVLPKHSLLYEYFTVYNELTKVKYVTEGMRKPAFLSGEQKKAIVDLLFKTNRKVTVKQLKEDYFKKIECFDSVEISGVEDRFNASLGTYHDLLKIIKDKDFLDNEENEDILEDIVLTLTLFEDREMIEERLKTYAHLFDDKVMKQLKRRRYTGWGRLSRKLINGIRDKQSGKTILDFLKSDGFANRNFMQLIHDDSLTFKEDIQKAQVSGQGDSLHEHIANLAGSPAIKKGILQTVKVVDELVKVMGRHKPENIVIEMARENQTTQKGQKNSRERMKRIEEGIKELGSQILKEHPVENTQLQNEKLYLYYLQNGRDMYVDQELDINRLSDYDVDHIVPQSFLKDDSIDNKVLTRSDKNRGKSDNVPSEEVVKKMKNYWRQLLNAKLITQRKFDNLTKAERGGLSELDKAGFIKRQLVETRQITKHVAQILDSRMNTKYDENDKLIREVKVITLKSKLVSDFRKDFQFYKVREINNYHHAHDAYLNAVVGTALIKKYPKLESEFVYGDYKVYDVRKMIAKSEQEIGKATAKYFFYSNIMNFFKTEITLANGEIRKRPLIETNGETGEIVWDKGRDFATVRKVLSMPQVNIVKKTEVQTGGFSKESILPKRNSDKLIARKKDWDPKKYGGFDSPTVAYSVLVVAKVEKGKSKKLKSVKELLGITIMERSSFEKNPIDFLEAKGYKEVKKDLIIKLPKYSLFELENGRKRMLASAGELQKGNELALPSKYVNFLYLASHYEKLKGSPEDNEQKQLFVEQHKHYLDEIIEQISEFSKRVILADANLDKVLSAYNKHRDKPIREQAENIIHLFTLTNLGAPAAFKYFDTTIDRKRYTSTKEVLDATLIHQSITGLYETRIDLSQLGGDSGGSPKKKRKV

SEQ ID NO: 377 - protein, 1775 aa, Artificial Sequence
  Synthetic
MSEVEFSHEYWMRHALTLAKRAWDEREVPVGAVLVHNNRVIGEGWNRPIGRHDPTAHAEIMALRQGGLVMQNYRLIDATLYVTLEPCVMCAGAMIHSRIGRVVFGARDAKTGAAGSLMDVLHHPGMNHRVEITEGILADECAALLSDFFRMRRQEIKAQKKAQSSTDSGGSSGGSSGSETPGTSESATPESSGGSSGGSSEVEFSHEYWMRHALTLAKRARDEREVPVGAVLVLNNRVIGEGWNRAIGLHDPTAHAEIMALRQGGLVMQNYRLIDATLYVTFEPCVMCAGAMIHSRIGRVVFGVRNAKTGAAGSLMDVLHYPGMNHRVEITEGILADECAALLCYFFRMPRQVFNAQKKAQSSTDSGGSSGGSSGSETPGTSESATPESSGGSSGGSDKKYSIGLAIGTNSVGWAVITDEYKVPSKKFKVLGNTDRHSIKKNLIGALLFDSGETAEATRLKRTARRRYTRRKNRICYLQEIFSNEMAKVDDSFFHRLEESFLVEEDKKHERHPIFGNIVDEVAYHEKYPTIYHLRKKLVDSTDKADLRLIYLALAHMIKFRGHFLIEGDLNPDNSDVDKLFIQLVQTYNQLFEENPINASGVDAKAILSARLSKSRRLENLIAQLPGEKKNGLFGNLIALSLGLTPNFKSNFDLAEDAKLQLSKDTYDDDLDNLLAQIGDQYADLFLAAKNLSDAILLSDILRVNTEITKAPLSASMIKRYDEHHQDLTLLKALVRQQLPEKYKEIFFDQSKNGYAGYIDGGASQEEFYKFIKPILEKMDGTEELLVKLNREDLLRKQRTFDNGSIPHQIHLGELHAILRRQEDFYPFLKDNREKIEKILTFRIPYYVGPLARGNSRFAWMTRKSEETITPWNFEEVVDKGASAQSFIERMTNFDKNLPNEKVLPKHSLLYEYFTVYNELTKVKYVTEGMRKPAFLSGEQKKAIVDLLFKTNRKVTVKQLKEDYFKKIECFDSVEISGVEDRFNASLGTYHDLLKIIKDKDFLDNEENEDILEDIVLTLTLFEDREMIEERLKTYAHLFDDKVMKQLKRRRYTGWGRLSRKLINGIRDKQSGKTILDFLKSDGFANRNFMQLIHDDSLTFKEDIQKAQVSGQGDSLHEHIANLAGSPAIKKGILQTVKVVDELVKVMGRHKPENIVIEMARENQTTQKGQKNSRERMKRIEEGIKELGSQILKEHPVENTQLQNEKLYLYYLQNGRDMYVDQELDINRLSDYDVDHIVPQSFLKDDSIDNKVLTRSDKNRGKSDNVPSEEVVKKMKNYWRQLLNAKLITQRKFDNLTKAERGGLSELDKAGFIKRQLVETRQITKHVAQILDSRMNTKYDENDKLIREVKVITLKSKLVSDFRKDFQFYKVREINNYHHAHDAYLNAVVGTALIKKYPKLESEFVYGDYKVYDVRKMIAKSEQEIGKATAKYFFYSNIMNFFKTEITLANGEIRKRPLIETNGETGEIVWDKGRDFATVRKVLSMPQVNIVKKTEVQTGGFSKESILPKRNSDKLIARKKDWDPKKYGGFDSPTVAYSVLVVAKVEKGKSKKLKSVKELLGITIMERSSFEKNPIDFLEAKGYKEVKKDLIIKLPKYSLFELENGRKRMLASAGELQKGNELALPSKYVNFLYLASHYEKLKGSPEDNEQKQLFVEQHKHYLDEIIEQISEFSKRVILADANLDKVLSAYNKHRDKPIREQAENIIHLFTLTNLGAPAAFKYFDTTIDRKRYTSTKEVLDATLIHQSITGLYETRIDLSQLGGDSGGSPKKKRKV

SEQ ID NO: 378 - protein, 1803 aa, Artificial Sequence
  Synthetic
MKRTADGSEFESPKKKRKVSEVEFSHEYWMRHALTLAKRAWDEREVPVGAVLVHNNRVIGEGWNRPIGRHDPTAHAEIMALRQGGLVMQNYRLIDATLYVTLEPCVMCAGAMIHSRIGRVVFGARDAKTGAAGSLMDVLHHPGMNHRVEITEGILADECAALLSDFFRMRRQEIKAQKKAQSSTDSGGSSGGSSGSETPGTSESATPESSGGSSGGSSEVEFSHEYWMRHALTLAKRARDEREVPVGAVLVLNNRVIGEGWNRAIGLHDPTAHAEIMALRQGGLVMQNYRLIDATLYVTFEPCVMCAGAMIHSRIGRVVFGVRNAKTGAAGSLMDVLHYPGMNHRVEITEGILADECAALLCYFFRMPRQVFNAQKKAQSSTDSGGSSGGSSGSETPGTSESATPESSGGSSGGSDKKYSIGLAIGTNSVGWAVITDEYKVPSKKFKVLGNTDRHSIKKNLIGALLFDSGETAEATRLKRTARRRYTRRKNRICYLQEIFSNEMAKVDDSFFHRLEESFLVEEDKKHERHPIFGNIVDEVAYHEKYPTIYHLRKKLVDSTDKADLRLIYLALAHMIKFRGHFLIEGDLNPDNSDVDKLFIQLVQTYNQLFEENPINASGVDAKAILSARLSKSRRLENLIAQLPGEKKNGLFGNLIALSLGLTPNFKSNFDLAEDAKLQLSKDTYDDDLDNLLAQIGDQYADLFLAAKNLSDAILLSDILRVNTEITKAPLSASMIKRYDEHHQDLTLLKALVRQQLPEKYKEIFFDQSKNGYAGYIDGGASQEEFYKFIKPILEKMDGTEELLVKLNREDLLRKQRTFDNGSIPHQIHLGELHAILRRQEDFYPFLKDNREKIEKILTFRIPYYVGPLARGNSRFAWMTRKSEETITPWNFEEVVDKGASAQSFIERMTNFDKNLPNEKVLPKHSLLYEYFTVYNELTKVKYVTEGMRKPAFLSGEQKKAIVDLLFKTNRKVTVKQLKEDYFKKIECFDSVEISGVEDRFNASLGTYHDLLKIIKDKDFLDNEENEDILEDIVLTLTLFEDREMIEERLKTYAHLFDDKVMKQLKRRRYTGWGRLSRKLINGIRDKQSGKTILDFLKSDGFANRNFMQLIHDDSLTFKEDIQKAQVSGQGDSLHEHIANLAGSPAIKKGILQTVKVVDELVKVMGRHKPENIVIEMARENQTTQKGQKNSRERMKRIEEGIKELGSQILKEHPVENTQLQNEKLYLYYLQNGRDMYVDQELDINRLSDYDVDHIVPQSFLKDDSIDNKVLTRSDKNRGKSDNVPSEEVVKKMKNYWRQLLNAKLITQRKFDNLTKAERGGLSELDKAGFIKRQLVETRQITKHVAQILDSRMNTKYDENDKLIREVKVITLKSKLVSDFRKDFQFYKVREINNYHHAHDAYLNAVVGTALIKKYPKLESEFVYGDYKVYDVRKMIAKSEQEIGKATAKYFFYSNIMNFFKTEITLANGEIRKRPLIETNGETGEIVWDKGRDFATVRKVLSMPQVNIVKKTEVQTGGFSKESILPKRNSDKLIARKKDWDPKKYGGFVSPTVAYSVLVVAKVEKGKSKKLKSVKELLGITIMERSSFEKNPIDFLEAKGYKEVKKDLIIKLPKYSLFELENGRKRMLASARELQKGNELALPSKYVNFLYLASHYEKLKGSPEDNEQKQLFVEQHKHYLDEIIEQISEFSKRVILADANLDKVLSAYNKHRDKPIREQAENIIHLFTLTNLGAPAAFKYFDTTIDRKQYRSTKEVLDATLIHQSITGLYETRIDLSQLGGDSGGSKRTADGSEFEPKKKRKV

SEQ ID NO: 379 - protein, 1605 aa, Artificial Sequence
  Synthetic
MKRTADGSEFESPKKKRKVSEVEFSHEYWMRHALTLAKRARDEREVPVGAVLVLNNRVIGEGWNRAIGLHDPTAHAEIMALRQGGLVMQNYRLIDATLYVTFEPCVMCAGAMIHSRIGRVVFGVRNSKRGAAGSLMNVLNYPGMNHRVEITEGILADECAALLCDFYRMPRQVFNAQKKAQSSINSGGSSGGSSGSETPGTSESATPESSGGSSGGSDKKYSIGLAIGTNSVGWAVITDEYKVPSKKFKVLGNTDRHSIKKNLIGALLFDSGETAEATRLKRTARRRYTRRKNRICYLQEIFSNEMAKVDDSFFHRLEESFLVEEDKKHERHPIFGNIVDEVAYHEKYPTIYHLRKKLVDSTDKADLRLIYLALAHMIKFRGHFLIEGDLNPDNSDVDKLFIQLVQTYNQLFEENPINASGVDAKAILSARLSKSRRLENLIAQLPGEKKNGLFGNLIALSLGLTPNFKSNFDLAEDAKLQLSKDTYDDDLDNLLAQIGDQYADLFLAAKNLSDAILLSDILRVNTEITKAPLSASMIKRYDEHHQDLTLLKALVRQQLPEKYKEIFFDQSKNGYAGYIDGGASQEEFYKFIKPILEKMDGTEELLVKLNREDLLRKQRTFDNGSIPHQIHLGELHAILRRQEDFYPFLKDNREKIEKILTFRIPYYVGPLARGNSRFAWMTRKSEETITPWNFEEVVDKGASAQSFIERMTNFDKNLPNEKVLPKHSLLYEYFTVYNELTKVKYVTEGMRKPAFLSGEQKKAIVDLLFKTNRKVTVKQLKEDYFKKIECFDSVEISGVEDRFNASLGTYHDLLKIIKDKDFLDNEENEDILEDIVLTLTLFEDREMIEERLKTYAHLFDDKVMKQLKRRRYTGWGRLSRKLINGIRDKQSGKTILDFLKSDGFANRNFMQLIHDDSLTFKEDIQKAQVSGQGDSLHEHIANLAGSPAIKKGILQTVKVVDELVKVMGRHKPENIVIEMARENQTTQKGQKNSRERMKRIEEGIKELGSQILKEHPVENTQLQNEKLYLYYLQNGRDMYVDQELDINRLSDYDVDHIVPQSFLKDDSIDNKVLTRSDKNRGKSDNVPSEEVVKKMKNYWRQLLNAKLITQRKFDNLTKAERGGLSELDKAGFIKRQLVETRQITKHVAQILDSRMNTKYDENDKLIREVKVITLKSKLVSDFRKDFQFYKVREINNYHHAHDAYLNAVVGTALIKKYPKLESEFVYGDYKVYDVRKMIAKSEQEIGKATAKYFFYSNIMNFFKTEITLANGEIRKRPLIETNGETGEIVWDKGRDFATVRKVLSMPQVNIVKKTEVQTGGFSKESILPKRNSDKLIARKKDWDPKKYGGFDSPTVAYSVLVVAKVEKGKSKKLKSVKELLGITIMERSSFEKNPIDFLEAKGYKEVKKDLIIKLPKYSLFELENGRKRMLASAGELQKGNELALPSKYVNFLYLASHYEKLKGSPEDNEQKQLFVEQHKHYLDEIIEQISEFSKRVILADANLDKVLSAYNKHRDKPIREQAENIIHLFTLTNLGAPAAFKYFDTTIDRKRYTSTKEVLDATLIHQSITGLYETRIDLSQLGGDSGGSKRTADGSEFEPKKKRKV

SEQ ID NO: 380 - protein, 1803 aa, Artificial Sequence
  Synthetic
MKRTADGSEFESPKKKRKVSEVEFSHEYWMRHALTLAKRAWDEREVPVGAVLVHNNRVIGEGWNRPIGRHDPTAHAEIMALRQGGLVMQNYRLIDATLYVTLEPCVMCAGAMIHSRIGRVVFGARDAKTGAAGSLMDVLHHPGMNHRVEITEGILADECAALLSDFFRMRRQEIKAQKKAQSSTDSGGSSGGSSGSETPGTSESATPESSGGSSGGSSEVEFSHEYWMRHALTLAKRARDEREVPVGAVLVLNNRVIGEGWNRAIGLHDPTAHAEIMALRQGGLVMQNYRLIDATLYVTFEPCVMCAGAMIHSRIGRVVFGVRNSKRGAAGSLMNVLNYPGMNHRVEITEGILADECAALLCDFYRMPRQVFNAQKKAQSSINSGGSSGGSSGSETPGTSESATPESSGGSSGGSDKKYSIGLAIGTNSVGWAVITDEYKVPSKKFKVLGNTDRHSIKKNLIGALLFDSGETAEATRLKRTARRRYTRRKNRICYLQEIFSNEMAKVDDSFFHRLEESFLVEEDKKHERHPIFGNIVDEVAYHEKYPTIYHLRKKLVDSTDKADLRLIYLALAHMIKFRGHFLIEGDLNPDNSDVDKLFIQLVQTYNQLFEENPINASGVDAKAILSARLSKSRRLENLIAQLPGEKKNGLFGNLIALSLGLTPNFKSNFDLAEDAKLQLSKDTYDDDLDNLLAQIGDQYADLFLAAKNLSDAILLSDILRVNTEITKAPLSASMIKRYDEHHQDLTLLKALVRQQLPEKYKEIFFDQSKNGYAGYIDGGASQEEFYKFIKPILEKMDGTEELLVKLNREDLLRKQRTFDNGSIPHQIHLGELHAILRRQEDFYPFLKDNREKIEKILTFRIPYYVGPLARGNSRFAWMTRKSEETITPWNFEEVVDKGASAQSFIERMTNFDKNLPNEKVLPKHSLLYEYFTVYNELTKVKYVTEGMRKPAFLSGEQKKAIVDLLFKTNRKVTVKQLKEDYFKKIECFDSVEISGVEDRFNASLGTYHDLLKIIKDKDFLDNEENEDILEDIVLTLTLFEDREMIEERLKTYAHLFDDKVMKQLKRRRYTGWGRLSRKLINGIRDKQSGKTILDFLKSDGFANRNFMQLIHDDSLTFKEDIQKAQVSGQGDSLHEHIANLAGSPAIKKGILQTVKVVDELVKVMGRHKPENIVIEMARENQTTQKGQKNSRERMKRIEEGIKELGSQILKEHPVENTQLQNEKLYLYYLQNGRDMYVDQELDINRLSDYDVDHIVPQSFLKDDSIDNKVLTRSDKNRGKSDNVPSEEVVKKMKNYWRQLLNAKLITQRKFDNLTKAERGGLSELDKAGFIKRQLVETRQITKHVAQILDSRMNTKYDENDKLIREVKVITLKSKLVSDFRKDFQFYKVREINNYHHAHDAYLNAVVGTALIKKYPKLESEFVYGDYKVYDVRKMIAKSEQEIGKATAKYFFYSNIMNFFKTEITLANGEIRKRPLIETNGETGEIVWDKGRDFATVRKVLSMPQVNIVKKTEVQTGGFSKESILPKRNSDKLIARKKDWDPKKYGGFDSPTVAYSVLVVAKVEKGKSKKLKSVKELLGITIMERSSFEKNPIDFLEAKGYKEVKKDLIIKLPKYSLFELENGRKRMLASAGELQKGNELALPSKYVNFLYLASHYEKLKGSPEDNEQKQLFVEQHKHYLDEIIEQISEFSKRVILADANLDKVLSAYNKHRDKPIREQAENIIHLFTLTNLGAPAAFKYFDTTIDRKRYTSTKEVLDATLIHQSITGLYETRIDLSQLGGDSGGSKRTADGSEFEPKKKRKV

SEQ ID NO: 381 - protein, 1291 aa, Artificial Sequence
  Synthetic
MKRTADGSEFESPKKKRKVSEVEFSHEYWMRHALTLAKRARDEREVPVGAVLVLNNRVIGEGWNRAIGLHDPTAHAEIMALRQGGLVMQNYRLIDATLYVTFEPCVMCAGAMIHSRIGRVVFGVRNSKRGAAGSLMNVLNYPGMNHRVEITEGILADECAALLCDFYRMPRQVFNAQKKAQSSINSGGSSGGSSGSETPGTSESATPESSGGSSGGSGKRNYILGLAIGITSVGYGIIDYETRDVIDAGVRLFKEANVENNEGRRSKRGARRLKRRRRHRIQRVKKLLFDYNLLTDHSELSGINPYEARVKGLSQKLSEEEFSAALLHLAKRRGVHNVNEVEEDTGNELSTKEQISRNSKALEEKYVAELQLERLKKDGEVRGSINRFKTSDYVKEAKQLLKVQKAYHQLDQSFIDTYIDLLETRRTYYEGPGEGSPFGWKDIKEWYEMLMGHCTYFPEELRSVKYAYNADLYNALNDLNNLVITRDENEKLEYYEKFQIIENVFKQKKKPTLKQIAKEILVNEEDIKGYRVTSTGKPEFTNLKVYHDIKDITARKEIIENAELLDQIAKILTIYQSSEDIQEELTNLNSELTQEEIEQISNLKGYTGTHNLSLKAINLILDELWHTNDNQIAIFNRLKLVPKKVDLSQQKEIPTTLVDDFILSPVVKRSFIQSIKVINAIIKKYGLPNDIIIELAREKNSKDAQKMINEMQKRNRQTNERIEEIIRTTGKENAKYLIEKIKLHDMQEGKCLYSLEAIPLEDLLNNPFNYEVDHIIPRSVSFDNSFNNKVLVKQEENSKKGNRTPFQYLSSSDSKISYETFKKHILNLAKGKGRISKTKKEYLLEERDINRFSVQKDFINRNLVDTRYATRGLMNLLRSYFRVNNLDVKVKSINGGFTSFLRRKWKFKKERNKGYKHHAEDALIIANADFIFKEWKKLDKAKKVMENQMFEEKQAESMPEIETEQEYKEIFITPHQIKHIKDFKDYKYSHRVDKKPNRELINDTLYSTRKDDKGNTLIVNNLNGLYDKDNDKLKKLINKSPEKLLMYHHDPQTYQKLKLIMEQYGDEKNPLYKYYEETGNYLTKYSKKDNGPVIKKIKYYGNKLNAHLDITDDYPNSRNKVVKLSLKPYRFDVYLDNGVYKFVTVKNLDVIKKENYYEVNSKCYEEAKKLKKISNQAEFIASFYNNDLIKINGELYRVIGVNNDLLNRIEVNMIDITYREYLENMNDKRPPRIIKTIASKTQSIKKYSTDILGNLYEVKSKKHPQIIKKGSGGSKRTADGSEFEPKKKRKV

SEQ ID NO: 382 - protein, 1605 aa, Artificial Sequence
  Synthetic
MKRTADGSEFESPKKKRKVSEVEFSHEYWMRHALTLAKRARDEREVPVGAVLVLNNRVIGEGWNRAIGLHDPTAHAEIMALRQGGLVMQNYRLIDATLYVTFEPCVMCAGAMIHSRIGRVVFGVRNSKRGAAGSLMNVLNYPGMNHRVEITEGILADECAALLCDFYRMPRQVFNAQKKAQSSINSGGSSGGSSGSETPGTSESATPESSGGSSGGSDKKYSIGLAIGTNSVGWAVITDEYKVPSKKFKVLGNTDRHSIKKNLIGALLFDSGETAEATRLKRTARRRYTRRKNRICYLQEIFSNEMAKVDDSFFHRLEESFLVEEDKKHERHPIFGNIVDEVAYHEKYPTIYHLRKKLVDSTDKADLRLIYLALAHMIKFRGHFLIEGDLNPDNSDVDKLFIQLVQTYNQLFEENPINASGVDAKAILSARLSKSRRLENLIAQLPGEKKNGLFGNLIALSLGLTPNFKSNFDLAEDAKLQLSKDTYDDDLDNLLAQIGDQYADLFLAAKNLSDAILLSDILRVNTEITKAPLSASMIKRYDEHHQDLTLLKALVRQQLPEKYKEIFFDQSKNGYAGYIDGGASQEEFYKFIKPILEKMDGTEELLVKLNREDLLRKQRTFDNGSIPHQIHLGELHAILRRQEDFYPFLKDNREKIEKILTFRIPYYVGPLARGNSRFAWMTRKSEETITPWNFEEVVDKGASAQSFIERMTNFDKNLPNEKVLPKHSLLYEYFTVYNELTKVKYVTEGMRKPAFLSGEQKKAIVDLLFKTNRKVTVKQLKEDYFKKIECFDSVEISGVEDRFNASLGTYHDLLKIIKDKDFLDNEENEDILEDIVLTLTLFEDREMIEERLKTYAHLFDDKVMKQLKRRRYTGWGRLSRKLINGIRDKQSGKTILDFLKSDGFANRNFMQLIHDDSLTFKEDIQKAQVSGQGDSLHEHIANLAGSPAIKKGILQTVKVVDELVKVMGRHKPENIVIEMARENQTTQKGQKNSRERMKRIEEGIKELGSQILKEHPVENTQLQNEKLYLYYLQNGRDMYVDQELDINRLSDYDVDHIVPQSFLKDDSIDNKVLTRSDKNRGKSDNVPSEEVVKKMKNYWRQLLNAKLITQRKFDNLTKAERGGLSELDKAGFIKRQLVETRQITKHVAQILDSRMNTKYDENDKLIREVKVITLKSKLVSDFRKDFQFYKVREINNYHHAHDAYLNAVVGTALIKKYPKLESEFVYGDYKVYDVRKMIAKSEQEIGKATAKYFFYSNIMNFFKTEITLANGEIRKRPLIETNGETGEIVWDKGRDFATVRKVLSMPQVNIVKKTEVQTGGFSKESIRPKRNSDKLIARKKDWDPKKYGGFVSPTVAYSVLVVAKVEKGKSKKLKSVKELLGITIMERSSFEKNPIDFLEAKGYKEVKKDLIIKLPKYSLFELENGRKRMLASARFLQKGNELALPSKYVNFLYLASHYEKLKGSPEDNEQKQLFVEQHKHYLDEIIEQISEFSKRVILADANLDKVLSAYNKHRDKPIREQAENIIHLFTLTNLGAPRAFKYFDTTIDRKVYRSTKEVLDATLIHQSITGLYETRIDLSQLGGDSGGSKRTADGSEFEPKKKRKV

SEQ ID NO: 383 - protein, 1291 aa, Artificial Sequence
  Synthetic
MKRTADGSEFESPKKKRKVSEVEFSHEYWMRHALTLAKRARDEREVPVGAVLVLNNRVIGEGWNRAIGLHDPTAHAEIMALRQGGLVMQNYRLIDATLYVTFEPCVMCAGAMIHSRIGRVVFGVRNSKRGAAGSLMNVLNYPGMNHRVEITEGILADECAALLCDFYRMPRQVFNAQKKAQSSINSGGSSGGSSGSETPGTSESATPESSGGSSGGSGKRNYILGLAIGITSVGYGIIDYETRDVIDAGVRLFKEANVENNEGRRSKRGARRLKRRRRHRIQRVKKLLFDYNLLTDHSELSGINPYEARVKGLSQKLSEEEFSAALLHLAKRRGVHNVNEVEEDTGNELSTKEQISRNSKALEEKYVAELQLERLKKDGEVRGSINRFKTSDYVKEAKQLLKVQKAYHQLDQSFIDTYIDLLETRRTYYEGPGEGSPFGWKDIKEWYEMLMGHCTYFPEELRSVKYAYNADLYNALNDLNNLVITRDENEKLEYYEKFQIIENVFKQKKKPTLKQIAKEILVNEEDIKGYRVTSTGKPEFTNLKVYHDIKDITARKEIIENAELLDQIAKILTIYQSSEDIQEELTNLNSELTQEEIEQISNLKGYTGTHNLSLKAINLILDELWHTNDNQIAIFNRLKLVPKKVDLSQQKEIPTTLVDDFILSPVVKRSFIQSIKVINAIIKKYGLPNDIIIELAREKNSKDAQKMINEMQKRNRQTNERIEEIIRTTGKENAKYLIEKIKLHDMQEGKCLYSLEAIPLEDLLNNPFNYEVDHIIPRSVSFDNSFNNKVLVKQEENSKKGNRTPFQYLSSSDSKISYETFKKHILNLAKGKGRISKTKKEYLLEERDINRFSVQKDFINRNLVDTRYATRGLMNLLRSYFRVNNLDVKVKSINGGFTSFLRRKWKFKKERNKGYKHHAEDALIIANADFIFKEWKKLDKAKKVMENQMFEEKQAESMPEIETEQEYKEIFITPHQIKHIKDFKDYKYSHRVDKKPNRKLINDTLYSTRKDDKGNTLIVNNLNGLYDKDNDKLKKLINKSPEKLLMYHHDPQTYQKLKLIMEQYGDEKNPLYKYYEETGNYLTKYSKKDNGPVIKKIKYYGNKLNAHLDITDDYPNSRNKVVKLSLKPYRFDVYLDNGVYKFVTVKNLDVIKKENYYEVNSKCYEEAKKLKKISNQAEFIASFYKNDLIKINGELYRVIGVNNDLLNRIEVNMIDITYREYLENMNDKRPPHIIKTIASKTQSIKKYSTDILGNLYEVKSKKHPQIIKKGSGGSKRTADGSEFEPKKKRKV

SEQ ID NO: 384 - protein, 1803 aa, Artificial Sequence
  Synthetic
MKRTADGSEFESPKKKRKVSEVEFSHEYWMRHALTLAKRARDEREVPVGAVLVLNNRVIGEGWNRAIGLHDPTAHAEIMALRQGGLVMQNYRLIDATLYVTFEPCVMCAGAMIHSRIGRVVFGVRNSKRGAAGSLMNVLNYPGMNHRVEITEGILADECAALLCDFYRMPRQVFNAQKKAQSSINSGGSSGGSSGSETPGTSESATPESSGGSSGGSSEVEFSHEYWMRHALTLAKRARDEREVPVGAVLVLNNRVIGEGWNRAIGLHDPTAHAEIMALRQGGLVMQNYRLIDATLYVTFEPCVMCAGAMIHSRIGRVVFGVRNSKRGAAGSLMNVLNYPGMNHRVEITEGILADECAALLCDFYRMPRQVFNAQKKAQSSINSGGSSGGSSGSETPGTSESATPESSGGSSGGSDKKYSIGLTIGTNSVGWAVITDEYKVPSKKFKVLGNTDRHSIKKNLIGALLFDSGETAEATRLKRTARRRYTRRKNRICYLQEIFSNEMAKVDDSFFHRLEESFLVEEDKKHERHPIFGNIVDEVAYHEKYPTIYHLRKKLVDSTDKADLRLIYLALAHMIKFRGHFLIEGDLNPDNSDVDKLFIQLVQTYNQLFEENPINASGVDAKAILSARLSKSRRLENLIAQLPGEKKNGLFGNLIALSLGLTPNFKSNFDLAEDAKLQLSKDTYDDDLDNLLAQIGDQYADLFLAAKNLSDAILLSDILRVNTEITKAPLSASMVKRYDEHHQDLTLLKALVRQQLPEKYKEIFFDQSKNGYAGYIDGGASQEEFYKFIKPILEKMDGTEELLVKLNREDLLRKQRTFDNGIIPHQIHLGELHAILRRQGDFYPFLKDNREKIEKILTFRIPYYVGPLARGNSRFAWMTRKSEETITPWNFEEVVDKGASAQSFIERMTNFDKNLPNEKVLPKHSLLYEYFTVYNELTKVKYVTEGMRKPAFLSGEQKKAIVDLLFKTNRKVTVKQLKEDYFKKIECFDSVEISGVEDRFNASLGTYHDLLKIIKDKDFLDNEENEDILEDIVLTLTLFEDREMIEERLKTYAHLFDDKVMKQLKRLRYTGWGRLSRKLINGIRDKQSGKTILDFLKSDGFANRNFMQLIHDDSLTFKEDIQKAQVSCQGDSLHEHIANLAGSPAIKKGILQTVKVVDELVKVMGGHKPENIVIEMARENQTTQKGQKNSRERMKRIEEGIKELGSQILKEHPVENTQLQNEKLYLYYLQNGRDMYVDQELDINRLSDYDVDHIVPQSFLKDDSIDNKVLTRSDKNRGKSDNVPSEEVVKKMKNYWRQLLNAKLITQRKFDNLTKAERGGLSELDKAGFIKRQLVETRQITKHVAQILDSRMNTKYDENDKLIREVKVITLKSKLVSDFRKDFQFYKVREINNYHHAHDAYLNAVVGTALIKKYPKLESEFVYGDYKVYDVRKMIAKSEQEIGKATAKYFFYSNIMNFFKTEITLANGEIRKRPLIETNGETGEIVWDKGRDFATVRKVLSMPQVNIVKKTEVQTGGFSKESILPKGNSDKLIARKKDWDPKKYGGFNSPTVAYSVLVVAKVEKGKSKKLKSVKELLGITIMERSSFEKNPIGFLEAKGYKEVKKDLIIKLPKYSLFELENGRKRMLASASVLHKGNELALPSKYVNFLYLASHYEKLKGSSEDNKQKQLFVEQHKHYLDEIIEQISEFSKRVILADANLDKVLSAYNKHRDKPIREQAENIIHLFTLTNLGASAAFKYFDTTIGRKLYTSTKEVLDATLIHQSITGLYETRIDLSQLGGDSGGSKRTADGSEFEPKKKRKV

SEQ ID NO: 385 - protein, 1803 aa, Artificial Sequence
  Synthetic
MKRTADGSEFESPKKKRKVSEVEFSHEYWMRHALTLAKRARDEREVPVGAVLVLNNRVIGEGWNRAIGLHDPTAHAEIMALRQGGLVMQNYRLIDATLYVTFEPCVMCAGAMIHSRIGRVVFGVRNSKRGAAGSLMNVLNYPGMNHRVEITEGILADECAALLCDFYRMPRQVFNAQKKAQSSINSGGSSGGSSGSETPGTSESATPESSGGSSGGSSEVEFSHEYWMRHALTLAKRARDEREVPVGAVLVLNNRVIGEGWNRAIGLHDPTAHAEIMALRQGGLVMQNYRLIDATLYVTFEPCVMCAGAMIHSRIGRVVFGVRNSKRGAAGSLMNVLNYPGMNHRVEITEGILADECAALLCDFYRMPRQVFNAQKKAQSSINSGGSSGGSSGSETPGTSESATPESSGGSSGGSDKKYSIGLTIGTNSVGWAVITDEYKVPSKKFKVLGNTDRHSIKKNLIGALLFDSGETAEATRLKRTARRRYTRRKNRICYLQEIFSNEMAKVDDSFFHRLEESFLVEEDKKHERHPIFGNIVDEVAYHEKYPTIYHLRKKLVDSTDKADLRLIYLALAHMIKFRGHFLIEGDLNPDNSDVDKLFIQLVQTYNQLFEENPINASGVDAKAILSARLSKSRRLENLIAQLPGEKKNGLFGNLIALSLGLTPNFKSNFDLAEDAKLQLSKDTYDDDLDNLLAQIGDQYADLFLAAKNLSDAILLSDILRVNTEITKAPLSASMVKRYDEHHQDLTLLKALVRQQLPEKYKEIFFDQSKNGYAGYIDGGASQEEFYKFIKPILEKMDGTEELLVKLNREDLLRKQRTFDNGIIPHQIHLGELHAILRRQGDFYPFLKDNREKIEKILTFRIPYYVGPLARGNSRFAWMTRKSEETITPWNFEEVVDKGASAQSFIERMTNFDKNLPNEKVLPKHSLLYEYFTVYNELTKVKYVTEGMRKPAFLSGEQKKAIVDLLFKTNRKVTVKQLKEDYFKKIECFDSVEISGVEDRFNASLGTYHDLLKIIKDKDFLDNEENEDILEDIVLTLTLFEDREMIEERLKTYAHLFDDKVMKQLKRLRYTGWGRLSRKLINGIRDKQSGKTILDFLKSDGFANRNFMQLIHDDSLTFKEDIQKAQVSCQGDSLHEHIANLAGSPAIKKGILQTVKVVDELVKVMGGHKPENIVIEMARENQTTQKGQKNSRERMKRIEEGIKELGSQILKEHPVENTQLQNEKLYLYYLQNGRDMYVDQELDINRLSDYDVDHIVPQSFLKDDSIDNKVLTRSDKNRGKSDNVPSEEVVKKMKNYWRQLLNAKLITQRKFDNLTKAERGGLSELDKAGFIKRQLVETRQITKHVAQILDSRMNTKYDENDKLIREVKVITLKSKLVSDFRKDFQFYKVREINNYHHAHDAYLNAVVGTALIKKYPKLESEFVYGDYKVYDVRKMIAKSEQEIGKATAKYFFYSNIMNFFKTEITLANGEIRKRPLIETNGETGEIVWDKGRDFATVRKVLSMPQVNIVKKTEVQTGGFSKESILPKGNSDKLIARKKDWDPKKYGGFNSPTAAYSVLVVAKVEKGKSKKLKSVKELLGITIMERSSFEKNPIGFLEAKGYKEVKKDLIIKLPKYSLFELENGRKRMLASAGVLHKGNELALPSKYVNFLYLASHYEKLKGSPEDNEQKQLFVEQHKHYLDEIIEQISEFSKRVILADANLDKVLSAYNKHRDKPIREQAENIIHLFTLTNLGVPAAFKYFDTTIDKKRYTSTKEVLDATLIHQSITGLYETRIDLSQLGGDSGGSKRTADGSEFEPKKKRKV

SEQ ID NO: 386 - protein, 1786 aa, Artificial Sequence
  Synthetic
MSEVEFSHEYWMRHALTLAKRAWDEREVPVGAVLVHNNRVIGEGWNRPIGRHDPTAHAEIMALRQGGLVMQNYRLIDATLYVTLEPCVMCAGAMIHSRIGRVVFGARDAKTGAAGSLMDVLHHPGMNHRVEITEGILADECAALLSDFFRMRRQEIKAQKKAQSSTDSGGSSGGSSGSETPGTSESATPESSGGSSGGSSEVEFSHEYWMRHALTLAKRARDEREVPVGAVLVLNNRVIGEGWNRAIGLHDPTAHAEIMALRQGGLVMQNYRLIDATLYVTFEPCVMCAGAMIHSRIGRVVFGVRNAKTGAAGSLMDVLHYPGMNHRVEITEGILADECAALLCYFFRMPRQVFNAQKKAQSSTDSGGSSGGSSGSETPGTSESATPESSGGSSGGSDKKYSIGLAIGTNSVGWAVITDEYKVPSKKFKVLGNTDRHSIKKNLIGALLFDSGETAEATRLKRTARRRYTRRKNRICYLQEIFSNEMAKVDDSFFHRLEESFLVEEDKKHERHPIFGNIVDEVAYHEKYPTIYHLRKKLVDSTDKADLRLIYLALAHMIKFRGHFLIEGDLNPDNSDVDKLFIQLVQTYNQLFEENPINASGVDAKAILSARLSKSRRLENLIAQLPGEKKNGLFGNLIALSLGLTPNFKSNFDLAEDTKLQLSKDTYDDDLDNLLAQIGDQYADLFLAAKNLSDAILLSDILRVNTEITKAPLSASMIKLYDEHHQDLTLLKALVRQQLPEKYKEIFFDQSKNGYAGYIDGGASQEEFYKFIKPILEKMDGTEELLVKLNREDLLRKQRTFDNGIIPHQIHLGELHAILRRQEDFYPFLKDNREKIEKILTFRIPYYVGPLARGNSRFAWMTRKSEETITPWNFEKVVDKGASAQSFIERMTNFDKNLPNEKVLPKHSLLYEYFTVYNELTKVKYVTEGMRKPAFLSGDQKKAIVDLLFKTNRKVTVKQLKEDYFKKIECFDSVEISGVEDRFNASLGTYHDLLKIIKDKDFLDNEENEDILEDIVLTLTLFEDREMIEERLKTYAHLFDDKVMKQLKRRRYTGWGRLSRKLINGIRDKQSGKTILDFLKSDGFANRNFIQLIHDDSLTFKEDIQKAQVSGQGDSLHEHIANLAGSPAIKKGILQTVKVVDELVKVMGRHKPENIVIEMARENQTTQKGQKNSRERMKRIEEGIKELGSQILKEHPVENTQLQNEKLYLYYLQNGRDMYVDQELDINRLSDYDVDHIVPQSFLKDDSIDNKVLTRSDKNRGKSDNVPSEEVVKKMKNYWRQLLNAKLITQRKFDNLTKAERGGLSELDKAGFIKRQLVETRQITKHVAQILDSRMNTKYDENDKLIREVKVITLKSKLVSDFRKDFQFYKVREINNYHHAHDAYLNAVVGTALIKKYPKLESEFVYGDYKVYDVRKMIAKSEQEIGKATAKYFFYSNIMNFFKTEITLANGEIRKRPLIETNGETGEIVWDKGRDFATVRKVLSMPQVNIVKKTEVQTGGFSKESILPKRNSDKLIARKKDWDPKKYGGFDSPTVAYSVLVVAKVEKGKSKKLKSVKELLGITIMERSSFEKNPIDFLEAKGYKEVKKDLIIKLPKYSLFELENGRKRMLASAGVLQKGNELALPSKYVNFLYLASHYEKLKGSPEDNEQKQLFVEQHKHYLDEIIEQISEFSKRVILADANLDKVLSAYNKHRDKPIREQAENIIHLFTLTNLGAPAAFKYFDTTIDRKRYTSTKEVLDATLIHQSITGLYETRIDLSQLGGDEGADKRTADGSEFESPKKKRKV

SEQ ID NO: 387 - protein, 1803 aa, Artificial Sequence
  Synthetic
MKRTADGSEFESPKKKRKVSEVEFSHEYWMRHALTLAKRARDEREVPVGAVLVLNNRVIGEGWNRAIGLHDPTAHAEIMALRQGGLVMQNYRLIDATLYVTFEPCVMCAGAMIHSRIGRVVFGVRNSKRGAAGSLMNVLNYPGMNHRVEITEGILADECAALLCDFYRMPRQVFNAQKKAQSSINSGGSSGGSSGSETPGTSESATPESSGGSSGGSSEVEFSHEYWMRHALTLAKRARDEREVPVGAVLVLNNRVIGEGWNRAIGLHDPTAHAEIMALRQGGLVMQNYRLIDATLYVTFEPCVMCAGAMIHSRIGRVVFGVRNSKRGAAGSLMNVLNYPGMNHRVEITEGILADECAALLCDFYRMPRQVFNAQKKAQSSINSGGSSGGSSGSETPGTSESATPESSGGSSGGSDKKYSIGLAIGTNSVGWAVITDEYKVPSKKFKVLGNTDRHSIKKNLIGALLFDSGETAEATRLKRTARRRYTRRKNRICYLQEIFSNEMAKVDDSFFHRLEESFLVEEDKKHERHPIFGNIVDEVAYHEKYPTIYHLRKKLVDSTDKADLRLIYLALAHMIKFRGHFLIEGDLNPDNSDVDKLFIQLVQTYNQLFEENPINASGVDAKAILSARLSKSRRLENLIAQLPGEKKNGLFGNLIALSLGLTPNFKSNFDLAEDAKLQLSKDTYDDDLDNLLAQIGDQYADLFLAAKNLSDAILLSDILRVNTEITKAPLSASMIKRYDEHHQDLTLLKALVRQQLPEKYKEIFFDQSKNGYAGYIDGGASQEEFYKFIKPILEKMDGTEELLVKLNREDLLRKQRTFDNGSIPHQIHLGELHAILRRQEDFYPFLKDNREKIEKILTFRIPYYVGPLARGNSRFAWMTRKSEETITPWNFEEVVDKGASAQSFIERMTNFDKNLPNEKVLPKHSLLYEYFTVYNELTKVKYVTEGMRKPAFLSGEQKKAIVDLLFKTNRKVTVKQLKEDYFKKIECFDSVEISGVEDRFNASLGTYHDLLKIIKDKDFLDNEENEDILEDIVLTLTLFEDREMIEERLKTYAHLFDDKVMKQLKRRRYTGWGRLSRKLINGIRDKQSGKTILDFLKSDGFANRNFMQLIHDDSLTFKEDIQKAQVSGQGDSLHEHIANLAGSPAIKKGILQTVKVVDELVKVMGRHKPENIVIEMARENQTTQKGQKNSRERMKRIEEGIKELGSQILKEHPVENTQLQNEKLYLYYLQNGRDMYVDQELDINRLSDYDVDHIVPQSFLKDDSIDNKVLTRSDKNRGKSDNVPSEEVVKKMKNYWRQLLNAKLITQRKFDNLTKAERGGLSELDKAGFIKRQLVETRQITKHVAQILDSRMNTKYDENDKLIREVKVITLKSKLVSDFRKDFQFYKVREINNYHHAHDAYLNAVVGTALIKKYPKLESEFVYGDYKVYDVRKMIAKSEQEIGKATAKYFFYSNIMNFFKTEITLANGEIRKRPLIETNGETGEIVWDKGRDFATVRKVLSMPQVNIVKKTEVQTGGFSKESILPKRNSDKLIARKKDWDPKKYGGFVSPTVAYSVLVVAKVEKGKSKKLKSVKELLGITIMERSSFEKNPIDFLEAKGYKEVKKDLIIKLPKYSLFELENGRKRMLASARELQKGNELALPSKYVNFLYLASHYEKLKGSPEDNEQKQLFVEQHKHYLDEIIEQISEFSKRVILADANLDKVLSAYNKHRDKPIREQAENIIHLFTLTNLGAPAAFKYFDTTIDRKQYRSTKEVLDATLIHQSITGLYETRIDLSQLGGDSGGSKRTADGSEFEPKKKRKV

SEQ ID NO: 388 - protein, 1605 aa, Artificial Sequence
  Synthetic
MKRTADGSEFESPKKKRKVSEVEFSHEYWMRHALTLAKRARDEREVPVGAVLVLNNRVIGEGWNRAIGLHDPTAHAEIMALRQGGLVMQNYRLIDATLYVTFEPCVMCAGAMIHSRIGRVVFGWRNSKRGAAGSLMNVLNYPGMNHRVEITEGILADECAALLCDFYRMPRQVFNAQKKAQSSINSGGSSGGSSGSETPGTSESATPESSGGSSGGSDKKYSIGLAIGTNSVGWAVITDEYKVPSKKFKVLGNTDRHSIKKNLIGALLFDSGETAEATRLKRTARRRYTRRKNRICYLQEIFSNEMAKVDDSFFHRLEESFLVEEDKKHERHPIFGNIVDEVAYHEKYPTIYHLRKKLVDSTDKADLRLIYLALAHMIKFRGHFLIEGDLNPDNSDVDKLFIQLVQTYNQLFEENPINASGVDAKAILSARLSKSRRLENLIAQLPGEKKNGLFGNLIALSLGLTPNFKSNFDLAEDAKLQLSKDTYDDDLDNLLAQIGDQYADLFLAAKNLSDAILLSDILRVNTEITKAPLSASMIKRYDEHHQDLTLLKALVRQQLPEKYKEIFFDQSKNGYAGYIDGGASQEEFYKFIKPILEKMDGTEELLVKLNREDLLRKQRTFDNGSIPHQIHLGELHAILRRQEDFYPFLKDNREKIEKILTFRIPYYVGPLARGNSRFAWMTRKSEETITPWNFEEVVDKGASAQSFIERMTNFDKNLPNEKVLPKHSLLYEYFTVYNELTKVKYVTEGMRKPAFLSGEQKKAIVDLLFKTNRKVTVKQLKEDYFKKIECFDSVEISGVEDRFNASLGTYHDLLKIIKDKDFLDNEENEDILEDIVLTLTLFEDREMIEERLKTYAHLFDDKVMKQLKRRRYTGWGRLSRKLINGIRDKQSGKTILDFLKSDGFANRNFMQLIHDDSLTFKEDIQKAQVSGQGDSLHEHIANLAGSPAIKKGILQTVKVVDELVKVMGRHKPENIVIEMARENQTTQKGQKNSRERMKRIEEGIKELGSQILKEHPVENTQLQNEKLYLYYLQNGRDMYVDQELDINRLSDYDVDHIVPQSFLKDDSIDNKVLTRSDKNRGKSDNVPSEEVVKKMKNYWRQLLNAKLITQRKFDNLTKAERGGLSELDKAGFIKRQLVETRQITKHVAQILDSRMNTKYDENDKLIREVKVITLKSKLVSDFRKDFQFYKVREINNYHHAHDAYLNAVVGTALIKKYPKLESEFVYGDYKVYDVRKMIAKSEQEIGKATAKYFFYSNIMNFFKTEITLANGEIRKRPLIETNGETGEIVWDKGRDFATVRKVLSMPQVNIVKKTEVQTGGFSKESILPKRNSDKLIARKKDWDPKKYGGFDSPTVAYSVLVVAKVEKGKSKKLKSVKELLGITIMERSSFEKNPIDFLEAKGYKEVKKDLIIKLPKYSLFELENGRKRMLASAGELQKGNELALPSKYVNFLYLASHYEKLKGSPEDNEQKQLFVEQHKHYLDEIIEQISEFSKRVILADANLDKVLSAYNKHRDKPIREQAENIIHLFTLTNLGAPAAFKYFDTTIDRKRYTSTKEVLDATLIHQSITGLYETRIDLSQLGGDSGGSKRTADGSEFEPKKKRKV

SEQ ID NO: 389 - protein, 102 aa, Artificial Sequence
  Synthetic
CLSYETEILTVEYGLLPIGKIVEKRIECTVYSVDNNGNIYTQPVAQWHDRGEQEVFEYCLEDGSLIRATKDHKFMTVDGQMLPIDEIFERELDLMRVDNLPN

SEQ ID NO: 390 - protein, 36 aa, Artificial Sequence
  Synthetic
MIKIATRKYLGKQNVYDIGVERDHNFALKNGFIASN

SEQ ID NO: 391 - protein, 101 aa, Artificial Sequence
  Synthetic
CLSYDTEILTVEYGFLPIGKIVEERIECTVYTVDKNGFVYTQPIAQWHNRGEQEVFEYCLEDGSIIRATKDHKFMTTDGQMLPIDEIFERGLDLKQVDGLP

SEQ ID NO: 392 - protein, 53 aa, Artificial Sequence
  Synthetic
MKRTADGSEFESPKKKRKVKIISRKSLGTQNVYDIGVEKDHNFLLKNGLVASN

SEQ ID NO: 393 - DNA, 17 bp, Artificial Sequence
  Synthetic
gtagtcattaacacaaa

SEQ ID NO: 394 - DNA, 17 bp, Artificial Sequence
  Synthetic
caaccatgcaagctttc

SEQ ID NO: 395 - DNA, 17 bp, Artificial Sequence
  Synthetic
gcttcagagaaatttcc

SEQ ID NO: 396 - DNA, 17 bp, Artificial Sequence
  Synthetic
tgattcacagatgcttc

SEQ ID NO: 397 - DNA, 17 bp, Artificial Sequence
  Synthetic
gctcagtactgaggcac

SEQ ID NO: 398 - DNA, 18 bp, Artificial Sequence
  Synthetic
ttcaaaagacyggcctta

SEQ ID NO: 399 - DNA, 17 bp, Artificial Sequence
  Synthetic
agacctcatgagtcagt

SEQ ID NO: 400 - DNA, 17 bp, Artificial Sequence
  Synthetic
ccattcatgcaggctac

SEQ ID NO: 401 - DNA, 17 bp, Artificial Sequence
  Synthetic
tccattatccaggcaga

SEQ ID NO: 402 - protein, 36 aa, Artificial Sequence
  Synthetic
  misc_feature (2)..(2): Xaa can be any naturally occurring amino acid
  misc_feature (4)..(26): Xaa can be any naturally occurring amino acid
  MISC_FEATURE (27)..(29): May or may not be present
  misc_feature (32)..(33): Xaa can be any naturally occurring amino acid
  MISC_FEATURE (34)..(35): May or may not be present
HXEXXXXXXXXXXXXXXXXXXXXXXXXXXPCXXXXC

SEQ ID NO: 403 - DNA, 17 bp, Artificial Sequence
  Synthetic
tgtcagaagaatgcaag

SEQ ID NO: 404 - DNA, 17 bp, Artificial Sequence
  Synthetic
gcttcagagaaatttaa

SEQ ID NO: 405 - DNA, 17 bp, Artificial Sequence
  Synthetic
tgattcacagatgcttc

SEQ ID NO: 406 - DNA, 18 bp, Artificial Sequence
  Synthetic
agacctcatgagatcagt

SEQ ID NO: 407 - DNA, 17 bp, Artificial Sequence
  Synthetic
ccattcatgcaggctac

SEQ ID NO: 408 - DNA, 17 bp, Artificial Sequence
  Synthetic
aaccatgacactctatt

SEQ ID NO: 409 - DNA, 17 bp, Artificial Sequence
  Synthetic
ttgtcagaaaaagtaat

SEQ ID NO: 410 - DNA, 23 bp, Artificial Sequence
  Synthetic
gtggtcattaacacaaactctgg

SEQ ID NO: 411 - DNA, 23 bp, Artificial Sequence
  Synthetic
gtagtcattaacacaaactctgg

SEQ ID NO: 412 - DNA, 23 bp, Artificial Sequence
  Synthetic
gtagtcgttaacacaaactctgg

SEQ ID NO: 413 - DNA, 23 bp, Artificial Sequence
  Synthetic
gtggtcgttaacacaaactctgg

SEQ ID NO: 414 - DNA, 23 bp, Artificial Sequence
  Synthetic
gtagtcattaacacaaactctgg

SEQ ID NO: 415 - DNA, 23 bp, Artificial Sequence
  Synthetic
gtggtcgttaacacaaactctgg

SEQ ID NO: 416 - DNA, 20 bp, Homo sapiens
gtggtcattaacacaaactc

SEQ ID NO: 417 - DNA, 20 bp, Homo sapiens
gtagtcattaacacaaactc

SEQ ID NO: 418 - DNA, 20 bp, Macaca mulatta
gtggtcattaacacgaactc

SEQ ID NO: 419 - DNA, 20 bp, Macaca mulatta
gtagtcattaacacgaactc

SEQ ID NO: 420 - DNA, 20 bp, Callithrix
gtagtcatcaacacgaactc

SEQ ID NO: 421 - DNA, 1278 bp, Artificial Sequence
  Synthetic
ggcgcgcccccagtcacgacgttgtaaaacggccttttcttaaagatgatctcttaccttgggaaaggagaggtgttcaattccttgcacagctcacagttccttcccgcatcagggaaaggttatgcattatggggaggcaagcgcaggcactcgggctggagctgttcgcgctggcatcttgctggtcatcatcctgcctttcaggtgggcttgatggcttgttccccgtaagaaaattaacaggttaagttgattttacgtctcagaagctcatatccaaagcaaaagacaagcaggaacatcctgttcctgtacggcatggtgttatatggagggggcaaaggtttctgttggcattggtgattcccgctgtggcagaatgccgtactccacatgcacattggtggtctcaatgtaacaggaatatttggtatatggtaacagcgacacaacaagccagccatatagacgcctctgctcccaggagagcttcactctttgatgacggccatgtctgaaaccttataggatatatgagtctactattactctctgcaattcagtttcttgaagatacaattgtcttaaaccggagaaaacctatacaatcaaatggcctgtgtgaaattgttatccgctgactggttccaattgacaagctccaagggttcagtggagagtctgtagtcattaacacaaactctggaagctgctactggtggcacagccagcaaccatgcaagctttcagctgatatgaatatcacatccaacatcattaaagcttcagagaaatttaaatccaaaattgcaaaatctcgccggatcctaactaaaataattcgctatgaagtgattcacagatgcttcgagggaaaagcttggttgctgtccaccgaaaatggggctcagtactgaggcactgtggggagaaagagtcaagtaacaaccgcgacatatcggtggtcatcatgcatcaaaccttcaggcacttttgttcaaaagctggccttaatgcctggtaagttctccagccttgggaaaagacctcatgactcagtcaaggatattgaagcacacactagctgtgcaacctccattcatgcaggctacaagggagaagttataccttatgcagttgctctcccatgttctctggcagggcctccattatccaggcagattttgacacactagcatttgcaggtttagagcagtttgtcagaagaatgcaagattttcgattataggatgtcagaatgccatttgcacgcgt

SEQ ID NO: 422 - DNA, 1094 bp, Artificial Sequence
  Synthetic
ggcgcgccctgttcctgtacggcatggattctgcaatcctcactctgggcagcgtgagtgcaaaaaagaagccaaaggcggaggaactacaggtccaggttctctaaagtaaaataaatccagaaagtcggggaggcaagcgcaggcactcgggctggagctgttcgcgctggcatcttgagaggatgggcttcaggattcaaccatgacactctattatcagctgtgtctgccgaaggatctgcaccaacttgtcagaaaaagtaatccttgcacagctcacatatcggtggtcatcatgcctggtcatcatcctgccttttcaacattgggcttgcagatgcactaccctgtcttagcattacagacagtcatttctttcttacctggttgacactaattacaccttcttccttgacgattaagccaaccactgctctgaaaaactcaactttcctcagatgtggtttctttatccttcctgaggatggtataacttcacgggagccctcccagaaagactcctcctgtgtgaaattgttatccgctgactggttccaattgacaagccccttactatttgctaggtttcggtagttgcatgaaggatgttaaatttacacaggtggctgcaccccagcaggtcatgagggtcttgtggtaacttctaccacaatctgtctgccacagcacttctagccatggccatcatgaagcctcccaaatctggtttcctgaggtggagtacagcattctgccacagcaggaatcacctttgctggtggagcatcctccactcatgcaggcttggagtgcatagctataggagagcaactgcataaggagtcaagtaacaaccgcgacccagggtggtgcacgcttgaattcatatttcataccttcaggacataaggagaggtatcatattggatcaacggcatcttaacacttccttcgtcagtcgttgacgattaggcacacacaggcactagccactgattgggtcacaaatggtcgtctgggctacattgaagccgtggcaccagttgtggtaggtgattcttcgaggatgtcagaatgccatttgcacgcgt

SEQ ID NO: 423-435 - skipped (13 entries)

SEQ ID NO: 436 - protein, 1368 aa, Artificial Sequence
  Synthetic
MDKKYSIGLDIGTNSVGWAVITDEYKVPSKKFKVLGNTDRHSIKKNLIGALLFDSGETAEATRLKRTARRRYTRRKNRICYLQEIFSNEMAKVDDSFFHRLEESFLVEEDKKHERHPIFGNIVDEVAYHEKYPTIYHLRKKLVDSTDKADLRLIYLALAHMIKFRGHFLIEGDLNPDNSDVDKLFIQLVQTYNQLFEENPINASGVDAKAILSARLSKSRRLENLIAQLPGEKKNGLFGNLIALSLGLTPNFKSNFDLAEDAKLQLSKDTYDDDLDNLLAQIGDQYADLFLAAKNLSDAILLSDILRVNTEITKAPLSASMVKRYDEHHQDLTLLKALVRQQLPEKYKEIFFDQSKNGYAGYIDGGASQEEFYKFIKPILEKMDGTEELLVKLNREDLLRKQRTFDNGIIPHQIHLGELHAILRRQGDFYPFLKDNREKIEKILTFRIPYYVGPLARGNSRFAWMTRKSEETITPWNFEEVVDKGASAQSFIERMTNFDKNLPNEKVLPKHSLLYEYFTVYNELTKVKYVTEGMRKPAFLSGEQKKAIVDLLFKTNRKVTVKQLKEDYFKKIECFDSVEISGVEDRFNASLGTYHDLLKIIKDKDFLDNEENEDILEDIVLTLTLFEDREMIEERLKTYAHLFDDKVMKQLKRLRYTGWGRLSRKLINGIRDKQSGKTILDFLKSDGFANRNFMQLIHDDSLTFKEDIQKAQVSGQGDSLHEHIANLAGSPAIKKGILQTVKVVDELVKVMGGHKPENIVIEMARENQTTQKGQKNSRERMKRIEEGIKELGSQILKEHPVENTQLQNEKLYLYYLQNGRDMYVDQELDINRLSDYDVDHIVPQSFLKDDSIDNKVLTRSDKNRGKSDNVPSEEVVKKMKNYWRQLLNAKLITQRKFDNLTKAERGGLSELDKAGFIKRQLVETRQITKHVAQILDSRMNTKYDENDKLIREVKVITLKSKLVSDFRKDFQFYKVREINNYHHAHDAYLNAVVGTALIKKYPKLESEFVYGDYKVYDVRKMIAKSEQEIGKATAKYFFYSNIMNFFKTEITLANGEIRKRPLIETNGETGEIVWDKGRDFATVRKVLSMPQVNIVKKTEVQTGGFSKESILPKGNSDKLIARKKDWDPKKYGGFNSPTAAYSVLVVAKVEKGKSKKLKSVKELLGITIMERSSFEKNPIGFLEAKGYKEVKKDLIIKLPKYSLFELENGRKRMLASAGVLHKGNELALPSKYVNFLYLASHYEKLKGSPEDNEQKQLFVEQHKHYLDEIIEQISEFSKRVILADANLDKVLSAYNKHRDKPIREQAENIIHLFTLTNLGVPAAFKYFDTTIDKKRYTSTKEVLDATLIHQSITGLYETRIDLSQLGGD

SEQ ID NO: 437 - protein, 1368 aa, Artificial Sequence
  Synthetic
MDKKYSIGLDIGTNSVGWAVITDEYKVPSKKFKVLGNTDRHSIKKNLIGALLFDSGETAEATRLKRTARRRYTRRKNRICYLQEIFSNEMAKVDDSFFHRLEESFLVEEDKKHERHPIFGNIVDEVAYHEKYPTIYHLRKKLVDSTDKADLRLIYLALAHMIKFRGHFLIEGDLNPDNSDVDKLFIQLVQTYNQLFEENPINASGVDAKAILSARLSKSRRLENLIAQLPGEKKNGLFGNLIALSLGLTPNFKSNFDLAEDAKLQLSKDTYDDDLDNLLAQIGDQYADLFLAAKNLSDAILLSDILRVNTEITKAPLSASMVKRYDEHHQDLTLLKALVRQQLPEKYKEIFFDQSKNGYAGYIDGGASQEEFYKFIKPILEKMDGTEELLVKLNREDLLRKQRTFDNGIIPHQIHLGELHAILRRQGDFYPFLKDNREKIEKILTFRIPYYVGPLARGNSRFAWMTRKSEETITPWNFEEVVDKGASAQSFIERMTNFDKNLPNEKVLPKHSLLYEYFTVYNELTKVKYVTEGMRKPAFLSGEQKKAIVDLLFKTNRKVTVKQLKEDYFKKIECFDSVEISGVEDRFNASLGTYHDLLKIIKDKDFLDNEENEDILEDIVLTLTLFEDREMIEERLKTYAHLFDDKVMKQLKRLRYTGWGRLSRKLINGIRDKQSGKTILDFLKSDGFANRNFMQLIHDDSLTFKEDIQKAQVSGQGDSLHEHIANLAGSPAIKKGILQTVKVVDELVKVMGGHKPENIVIEMARENQTTQKGQKNSRERMKRIEEGIKELGSQILKEHPVENTQLQNEKLYLYYLQNGRDMYVDQELDINRLSDYDVDHIVPQSFLKDDSIDNKVLTRSDKNRGKSDNVPSEEVVKKMKNYWRQLLNAKLITQRKFDNLTKAERGGLSELDKAGFIKRQLVETRQITKHVAQILDSRMNTKYDENDKLIREVKVITLKSKLVSDFRKDFQFYKVREINNYHHAHDAYLNAVVGTALIKKYPKLESEFVYGDYKVYDVRKMIAKSEQEIGKATAKYFFYSNIMNFFKTEITLANGEIRKRPLIETNGETGEIVWDKGRDFATVRKVLSMPQVNIVKKTEVQTGGFSKESILPKGNSDKLIARKKDWDPKKYGGFNSPTVAYSVLVVAKVEKGKSKKLKSVKELLGITIMERSSFEKNPIDFLEAKGYKEVKKDLIIKLPKYSLFELENGRKRMLASAGVLQKGNELALPSKYVNFLYLASHYEKLKGSPEDNEQKQLFVEQHKHYLDEIIEQISEFSKRVILADANLDKVLSAYNKHRDKPIREQAENIIHLFTLTNLGAPAAFKYFDTTINRKQYNTTKEVLDATLIRQSITGLYETRIDLSQLGGD

SEQ ID NO: 438-443 - skipped (6 entries)

SEQ ID NO: 444 - RNA, 81 nt, Artificial Sequence
  Synthetic
guuuuagagcuagaaauagcaaguuaaaauaaggcuaguccguuaucaacuugaaaaaguggcaccgagucggugcuuuuu

SEQ ID NO: 445 - RNA, 91 nt, Artificial Sequence
  Synthetic
guuuuaguacucuguaaugaaaauuacagaaucuacuaaaacaaggcaaaaugccguguuuaucucgucaacuuguuggcgagauuuuuuu

SEQ ID NO: 446 - RNA, 21 nt, Artificial Sequence
  Synthetic
uaauuucuacuaaguguagau

SEQ ID NO: 447 - skipped

SEQ ID NO: 448 - DNA, 25 bp, Streptococcus pyogenes
caccgctcttaccttgggaaaggag

SEQ ID NO: 449 - DNA, 25 bp, Streptococcus pyogenes
caccgttccttcccgcatcagggaa

SEQ ID NO: 450 - DNA, 25 bp, Streptococcus pyogenes
caccgttccccgtaagaaaattaac

SEQ ID NO: 451 - DNA, 25 bp, Streptococcus pyogenes
caccgatccaaagcaaaagacaagc

SEQ ID NO: 452 - DNA, 25 bp, Streptococcus aureus
caccgattggtgattcccgctgtgg

SEQ ID NO: 453 - DNA, 25 bp, Streptococcus pyogenes
caccgtaacaggaatatttggtata

SEQ ID NO: 454 - DNA, 25 bp, Streptococcus pyogenes
caccgtagacgcctctgctcccagg

SEQ ID NO: 455 - DNA, 25 bp, Streptococcus aureus
caccgatgagtctactattactctc

SEQ ID NO: 456 - DNA, 25 bp, Streptococcus aureus
caccgcttaaaccggagaaaaccta

SEQ ID NO: 457 - DNA, 24 bp, Streptococcus pyogenes
caccgtagtcattaacacaaactc

SEQ ID NO: 458 - DNA, 25 bp, Streptococcus pyogenes
caccgcaaccatgcaagctttcagc

SEQ ID NO: 459 - DNA, 24 bp, Streptococcus aureus
caccgcttcagagaaatttaaatc

SEQ ID NO: 460 - DNA, 25 bp, Streptococcus pyogenes
caccgtgattcacagatgcttcgag

SEQ ID NO: 461 - DNA, 24 bp, Streptococcus pyogenes
caccgctcagtactgaggcactgt

SEQ ID NO: 462 - DNA, 25 bp, Streptococcus aureus
caccgttcaaaagctggccttaatg

SEQ ID NO: 463 - DNA, 25 bp, Streptococcus pyogenes
caccgagacctcatgactcagtcaa

SEQ ID NO: 464 - DNA, 25 bp, Streptococcus pyogenes
caccgccattcatgcaggctacaag

SEQ ID NO: 465 - DNA, 25 bp, Streptococcus pyogenes
caccgtccattatccaggcagattt

SEQ ID NO: 466 - DNA, 25 bp, Streptococcus aureus
caccgtgtcagaagaatgcaagatt

SEQ ID NO: 467 - DNA, 25 bp, Streptococcus pyogenes
caccgcgggctggagctgttcgcgc

SEQ ID NO: 468 - DNA, 24 bp, Streptococcus pyogenes
caccgggcagcgtgagtgcaaaaa

SEQ ID NO: 469 - DNA, 25 bp, Streptococcus pyogenes
caccgctctaaagtaaaataaatcc

SEQ ID NO: 470 - DNA, 25 bp, Streptococcus pyogenes
caccgaaccatgacactctattatc

SEQ ID NO: 471 - DNA, 25 bp, Streptococcus pyogenes
caccgttgtcagaaaaagtaatcct

SEQ ID NO: 472 - DNA, 25 bp, Streptococcus pyogenes
caccgctaccctgtcttagcattac

SEQ ID NO: 473 - DNA, 25 bp, Streptococcus pyogenes
caccgactaattacaccttcttcct

SEQ ID NO: 474 - DNA, 25 bp, Streptococcus pyogenes
caccgaactcaactttcctcagatg

SEQ ID NO: 475 - DNA, 25 bp, Streptococcus pyogenes
caccgaacttcacgggagccctccc

SEQ ID NO: 476 - DNA, 25 bp, Streptococcus pyogenes
caccgttcggtagttgcatgaagga

SEQ ID NO: 477 - DNA, 25 bp, Streptococcus pyogenes
caccgagcaggtcatgagggtcttg

SEQ ID NO: 478 - DNA, 25 bp, Streptococcus pyogenes
caccgtctagccatggccatcatga

SEQ ID NO: 479 - DNA, 24 bp, Streptococcus pyogenes
caccgtacagcattctgccacagc

SEQ ID NO: 480 - DNA, 25 bp, Streptococcus pyogenes
caccgccactcatgcaggcttggag

SEQ ID NO: 481 - DNA, 25 bp, Streptococcus pyogenes
caccgaattcatatttcataccttc

SEQ ID NO: 482 - DNA, 25 bp, Streptococcus pyogenes
caccgcggcatcttaacacttcctt

SEQ ID NO: 483 - DNA, 25 bp, Streptococcus pyogenes
caccgcaggcactagccactgattg

SEQ ID NO: 484 - DNA, 25 bp, Streptococcus pyogenes
aaacctcctttcccaaggtaagagc

SEQ ID NO: 485 - DNA, 25 bp, Streptococcus pyogenes
aaacttccctgatgcgggaaggaac

SEQ ID NO: 486 - DNA, 25 bp, Streptococcus pyogenes
aaacgttaattttcttacggggaac

SEQ ID NO: 487 - DNA, 25 bp, Streptococcus pyogenes
aaacgcttgtcttttgctttggatc

SEQ ID NO: 488 - DNA, 25 bp, Streptococcus aureus
aaacccacagcgggaatcaccaatc

SEQ ID NO: 489 - DNA, 25 bp, Streptococcus pyogenes
aaactataccaaatattcctgttac

SEQ ID NO: 490 - DNA, 25 bp, Streptococcus pyogenes
aaaccctgggagcagaggcgtctac

SEQ ID NO: 491 - DNA, 25 bp, Streptococcus aureus
aaacgagagtaatagtagactcatc

SEQ ID NO: 492 - DNA, 25 bp, Streptococcus aureus
aaactaggttttctccggtttaagc

SEQ ID NO: 493 - DNA, 24 bp, Streptococcus pyogenes
aaacgagtttgtgttaatgactac

SEQ ID NO: 494 - DNA, 25 bp, Streptococcus pyogenes
aaacgctgaaagcttgcatggttgc

SEQ ID NO: 495 - DNA, 24 bp, Streptococcus aureus
aaacgatttaaatttctctgaagc

SEQ ID NO: 496 - DNA, 25 bp, Streptococcus pyogenes
aaacctcgaagcatctgtgaatcac

SEQ ID NO: 497 - DNA, 24 bp, Streptococcus pyogenes
aaacacagtgcctcagtactgagc

SEQ ID NO: 498 - DNA, 25 bp, Streptococcus aureus
aaaccattaaggccagcttttgaac

SEQ ID NO: 499 - DNA, 25 bp, Streptococcus pyogenes
aaacttgactgagtcatgaggtctc

SEQ ID NO: 500 - DNA, 25 bp, Streptococcus pyogenes
aaaccttgtagcctgcatgaatggc

SEQ ID NO: 501 - DNA, 25 bp, Streptococcus pyogenes
aaacaaatctgcctggataatggac

SEQ ID NO: 502 - DNA, 25 bp, Streptococcus aureus
aaacaatcttgcattcttctgacac

SEQ ID NO: 503 - DNA, 25 bp, Streptococcus pyogenes
aaacgcgcgaacagctccagcccgc

SEQ ID NO: 504 - DNA, 24 bp, Streptococcus pyogenes
aaactttttgcactcacgctgccc

SEQ ID NO: 505 - DNA, 25 bp, Streptococcus pyogenes
aaacggatttattttactttagagc

SEQ ID NO: 506 - DNA, 25 bp, Streptococcus pyogenes
aaacgataatagagtgtcatggttc

SEQ ID NO: 507 - DNA, 25 bp, Streptococcus pyogenes
aaacaggattactttttctgacaac

SEQ ID NO: 508 - DNA, 25 bp, Streptococcus pyogenes
aaacgtaatgctaagacagggtagc

SEQ ID NO: 509 - DNA, 25 bp, Streptococcus pyogenes
aaacaggaagaaggtgtaattagtc

SEQ ID NO: 510 - DNA, 25 bp, Streptococcus pyogenes
aaaccatctgaggaaagttgagttc

SEQ ID NO: 511 - DNA, 25 bp, Streptococcus pyogenes
aaacgggagggctcccgtgaagttc

SEQ ID NO: 512 - DNA, 25 bp, Streptococcus pyogenes
aaactccttcatgcaactaccgaac

SEQ ID NO: 513 - DNA, 25 bp, Streptococcus pyogenes
aaaccaagaccctcatgacctgctc

SEQ ID NO: 514 - DNA, 25 bp, Streptococcus pyogenes
aaactcatgatggccatggctagac

SEQ ID NO: 515 - DNA, 24 bp, Streptococcus pyogenes
aaacgctgtggcagaatgctgtac

SEQ ID NO: 516 - DNA, 25 bp, Streptococcus pyogenes
aaacctccaagcctgcatgagtggc

SEQ ID NO: 517 - DNA, 25 bp, Streptococcus pyogenes
aaacgaaggtatgaaatatgaattc

SEQ ID NO: 518 - DNA, 25 bp, Streptococcus pyogenes
aaacaaggaagtgttaagatgccgc

SEQ ID NO: 519 - DNA, 25 bp, Streptococcus pyogenes
aaaccaatcagtggctagtgcctgc

SEQ ID NO: 520 - DNA, 23 bp, Artificial Sequence
  Synthetic
cccagtcacgacgttgtaaaacg

SEQ ID NO: 521 - DNA, 23 bp, Artificial Sequence
  Synthetic
agcggataacaatttcacacagg

SEQ ID NO: 522 - DNA, 21 bp, Artificial Sequence
  Synthetic
gactggttccaattgacaagc

SEQ ID NO: 523 - DNA, 21 bp, Artificial Sequence
  Synthetic
gcaaatggcattctgacatcc

SEQ ID NO: 524 - DNA, 19 bp, Artificial Sequence
  Synthetic
agtcaagtaacaaccgcga

SEQ ID NO: 525 - DNA, 19 bp, Artificial Sequence
  Synthetic
ccttatgcagttgctctcc

SEQ ID NO: 526 - DNA, 20 bp, Artificial Sequence
  Synthetic
ctggtcatcatcctgccttt

SEQ ID NO: 527 - DNA, 17 bp, Artificial Sequence
  Synthetic
gccccctccatataaca

SEQ ID NO: 528 - DNA, 18 bp, Artificial Sequence
  Synthetic
aaatgggcggtaggcgtg

SEQ ID NO: 529 - DNA, 20 bp, Artificial Sequence
  Synthetic
attaggacaaggctggtggg

SEQ ID NO: 530 - DNA, 19 bp, Artificial Sequence
  Synthetic
ctgttcctgtacggcatgg

SEQ ID NO: 531 - DNA, 18 bp, Artificial Sequence
  Synthetic
ctttgatgacggccatgt

SEQ ID NO: 532 - DNA, 20 bp, Artificial Sequence
  Synthetic
aatctcgccggatcctaact

SEQ ID NO: 533 - DNA, 20 bp, Artificial Sequence
  Synthetic
gcatgatgaccaccgatatg

SEQ ID NO: 534 - DNA, 20 bp, Artificial Sequence
  Synthetic
ggtccactagtgctgtcctg

SEQ ID NO: 535 - DNA, 20 bp, Artificial Sequence
  Synthetic
aggttccgtcttcctccact

SEQ ID NO: 536 - DNA, 20 bp, Artificial Sequence
  Synthetic
cttgccaaggactcaaaccc

SEQ ID NO: 537 - DNA, 45 bp, Artificial Sequence
  Synthetic
tgtcagataccatatgctgctcagcttccagtggagagtctaaag

SEQ ID NO: 538 - DNA, 28 bp, Artificial Sequence
  Synthetic
gttaatgactacagactctccactgaac

SEQ ID NO: 539 - DNA, 31 bp, Artificial Sequence
  Synthetic
gagagtctgtagtcattaacacaaactctgg

SEQ ID NO: 540 - DNA, 43 bp, Artificial Sequence
  Synthetic
gttaacaggctcagaccagctcagctcaacactggtggacttc

SEQ ID NO: 541 - DNA, 40 bp, Artificial Sequence
  Synthetic
cagatccgctagagatccgcggccgccaccatgaattgcc

SEQ ID NO: 542 - DNA, 34 bp, Artificial Sequence
  Synthetic
aaagacctcatgactcagtcaaggatattgaagc

SEQ ID NO: 543 - DNA, 34 bp, Artificial Sequence
  Synthetic
gactgagtcatgaggtcttttcccaaggctggag

SEQ ID NO: 544 - DNA, 40 bp, Artificial Sequence
  Synthetic
gtgccaaagggtggacccgcgggtggctgccagggcaacg

SEQ ID NO: 545 - DNA, 46 bp, Artificial Sequence
  Synthetic
cagatccgctagagatccgcggccgccaccatgaattgcccagttc

SEQ ID NO: 546 - DNA, 32 bp, Artificial Sequence
  Synthetic
caacttgtcagaaaaagtaatccttgcacagc

SEQ ID NO: 547 - DNA, 29 bp, Artificial Sequence
  Synthetic
ttactttttctgacaagttggtgcagatc

SEQ ID NO: 548 - DNA, 46 bp, Artificial Sequence
  Synthetic
ttgcactgcctgccagacacgtgtctcttacaattacactgtcctc

SEQ ID NO: 549 - DNA, 44 bp, Artificial Sequence
  Synthetic
agtgtaattgtaagagacacgtgtctggcaggcagtgcaatcag

SEQ ID NO: 550 - DNA, 37 bp, Artificial Sequence
  Synthetic
tgaaaaactcaactttcctcagatgtggtttctttag

SEQ ID NO: 551 - DNA, 28 bp, Artificial Sequence
  Synthetic
gaggaaagttgagtttttcagagcagtg

SEQ ID NO: 552 - DNA, 47 bp, Artificial Sequence
  Synthetic
aagttccaggaaccctgctcctaggaactgagctccctcatttaatg

SEQ ID NO: 553 - DNA, 125 bp, Artificial Sequence
  Synthetic
  misc_feature (1)..(8): n is a, c, g, or t
nnnnnnnngtttttgtactctcaagatttagaaataaatcttgcagaagctacaaagataaggcttcatgccgaaatcaacaccctgtcattttatggcagggtgttttcgttatttaatttttt

SEQ ID NO: 554 - DNA, 121 bp, Artificial Sequence
  Synthetic
  misc_feature (1)..(18): n is a, c, g, or t
nnnnnnnnnnnnnnnnnngtttttgtactctcagaaatgcagaagctacaaagataaggcttcatgccgaaatcaacaccctgtcattttatggcagggtgttttcgttatttaatttttt

SEQ ID NO: 555 - DNA, 109 bp, Artificial Sequence
  Synthetic
  misc_feature (1)..(20): n is a, c, g, or t
nnnnnnnnnnnnnnnnnnnngtttttgtactctcagaaatgcagaagctacaaagataaggcttcatgccgaaatcaacaccctgtcattttatggcagggtgtttttt

SEQ ID NO: 556 - DNA, 102 bp, Artificial Sequence
  Synthetic
  misc_feature (1)..(20): n is a, c, g, or t
nnnnnnnnnnnnnnnnnnnngttttagagctagaaatagcaagttaaaataaggctagtccgttatcaacttgaaaaagtggcaccgagtcggtgctttttt

SEQ ID NO: 557 - DNA, 88 bp, Artificial Sequence
  Synthetic
  misc_feature (1)..(20): n is a, c, g, or t
nnnnnnnnnnnnnnnnnnnngttttagagctagaaatagcaagttaaaataaggctagtccgttatcaacttgaaaaagtgttttttt

SEQ ID NO: 558 - DNA, 76 bp, Artificial Sequence
  Synthetic
  misc_feature (1)..(20): n is a, c, g, or t
nnnnnnnnnnnnnnnnnnnngttttagagctagaaatagcaagttaaaataaggctagtccgttatcatttttttt

SEQ ID NO: 559 - DNA, 21 bp, Artificial Sequence
  Synthetic
gctttagggcttaggtgtgat

SEQ ID NO: 560 - DNA, 20 bp, Artificial Sequence
  Synthetic
ggagctaaattacaatgaag

SEQ ID NO: 561 - DNA, 19 bp, Artificial Sequence
  Synthetic
gcagagaacctagagaaga

SEQ ID NO: 562 - DNA, 20 bp, Artificial Sequence
  Synthetic
ccgaaacctagcaaatagta

SEQ ID NO: 563 - DNA, 20 bp, Artificial Sequence
  Synthetic
atctaaagcaaaagacaagc

SEQ ID NO: 564 - DNA, 20 bp, Artificial Sequence
  Synthetic
cagctgtcaacaataaatgc

SEQ ID NO: 565 - DNA, 20 bp, Artificial Sequence
  Synthetic
ttcaccgtgcaatttaggac

SEQ ID NO: 566 - DNA, 20 bp, Artificial Sequence
  Synthetic
agacctagaaaaagcaagca

SEQ ID NO: 567 - DNA, 18 bp, Artificial Sequence
  Synthetic
atccctttaaagagagag

SEQ ID NO: 568 - DNA, 20 bp, Artificial Sequence
  Synthetic
tgttccctgtaagaaaatta

What is claimed is:

1. A method for deaminating an adenosine (A) in an USH2A gene, the method comprising contacting the USH2A gene with a base editor in association with a guide RNA (gRNA), wherein the gRNA comprises a guide sequence that is complementary to a target nucleic acid sequence in the USH2A gene, wherein the base editor comprises a nucleic acid programmable DNA binding protein (napDNAbp) domain and an adenosine deaminase domain, wherein the guide sequence comprises a protospacer that comprises a nucleic acid sequence having at least 90%, at least 95%, at least 98%, or at least 99% identity to any one of SEQ ID NOs: 12-35, or a naturally-occurring variant thereof.

2. The method of claim 1, wherein the guide sequence comprises at least 10, 11, 12, 13, 14, 15, 16, 17, 18, 19, 20, 21, 22, 23, 24, or 25 contiguous nucleobases that are at least 90%, at least 95%, or 100% complementary to the target nucleic acid sequence of the USH2A gene.

3. The method of claim 1 or 2, wherein the guide sequence comprises a protospacer that comprises a nucleic acid sequence that differs by 1, 2, 3, 4, 5, 6, 7, 8, 9, or 10 nucleotides from the nucleotide sequence of any one of SEQ ID NOs: 12-35.

4. The method of any one of claims 1-3, wherein the guide sequence comprises a protospacer that comprises a nucleic acid sequence having at least 90%, at least 95%, at least 98%, or at least 99% identity to any one of SEQ ID NOs: 12, 15, 16, 18, and 19.

5. The method of any one of claims 1-4, wherein the guide sequence comprises a protospacer that comprises the nucleic acid sequence of any one of SEQ ID NOs: 12, 15, 16, 18, and 19.

6. The method of any one of claims 1-5, wherein the adenosine deaminase domain comprises a first adenosine deaminase selected from a wild-type TadA, an N-terminal truncated TadA, a TadA7.10, and a TadA-8e.

7. The method of any one of claims 1-6, wherein the first adenosine deaminase comprises an amino acid sequence having at least 90%, at least 95%, at least 98%, or at least 99% identity to any one of SEQ ID NOs: 79, 90, and 91.

8. The method of any one of claims 1-7, wherein the first adenosine deaminase comprises an amino acid sequence selected from the group consisting of SEQ ID NOs: 79, 90, and 91.

9. The method of any one of claims 1-8, wherein the first adenosine deaminase comprises the amino acid sequence of SEQ ID NO: 91.

10. The method of any one of claims 1-9, wherein the base editor is ABE7.10, ABE8e, ABE8e-SaKKH, ABE8e-NG, ABE-xCas9, ABE7.10-SaKKH, ABE7.10-NG, ABE7.10-VRQR, ABE8e-NRTH, ABE8e-NRRH, or ABE8e-VRQR.

11. The method of any one of claims 1-10, wherein the guide sequence comprises at least 15 contiguous nucleobases that are at least 90%, at least 95%, or 100% complementary to the target nucleic acid sequence of the USH2A gene.

12. The method of any one of claims 1-11, wherein the napDNAbp domain comprises a nuclease or a nickase.

13. The method of any one of claims 1-12, wherein the napDNAbp domain comprises a S. pyogenes Cas9 (SpCas9), a S. aureus Cas9 (SaCas9), or a variant thereof.

14. The method of any one of claims 1-13, wherein the napDNAbp domain comprises a wild-type SpCas9, a wild-type SaCas9, a SpCas9-VRQR, a SaCas9-KKH, a SpCas9-NG, an xCas9, a SpCas9-NRRH, or a SpCas9-NRTH.

15. The method of any one of claims 1-14, wherein the napDNAbp domain comprises a wild-type SpCas9 or a SpCas9-VRQR.

16. The method of any one of claims 1-15, wherein the USH2A gene comprises a C100T, a G802A, a C1000T, a C1876T, a C2209T, a C2440T, a C2755T, a C2797T, a C3883T, a C4645T, a C4957T, a G5581A, a C8167T, a C9874T, a C9815T, a C10712T, a G11864A, a G12575A, a C13010T, a C13274T, a C13316T, a C13822T, a C14803T, or a C15017T mutation.

17. The method of any one of claims 1-16, wherein the USH2A gene comprises a C100T, a G11864A, a G12575A, a C13274T, or a C14803T mutation.

18. The method of any one of claims 1-17, wherein the guide RNA comprises a nucleic acid sequence that is at least 90%, at least 95%, at least 98%, or at least 99% identical to any one of SEQ ID NOs: 36, 46, 47, 50, 53, 56, 57, and 93.

19. The method of any one of claims 1-18, wherein the guide RNA comprise a nucleic acid sequence that differs by 1, 2, 3, 4, 5, or 6 nucleotides from the nucleotide sequence of any one of SEQ ID NOs: 36, 46, 47, 50, 53, 56, 57, and 93.

20. The method of any one of claims 1-19, wherein the guide sequence comprises a nucleic acid selected from SEQ ID NOs: 36, 46, 47, 50, 53, 56, 57, and 93.

21. The method of any one of claims 1-20, wherein the guide sequence comprises a nucleic acid sequence selected from the group consisting of SEQ ID NOs: 36, 47, and 93.

22. The method of any one of claims 18-21, wherein the step of contacting results in the disruption of a splice site in the USH2A gene.

23. The method of any one of claims 18-22, wherein the step of contacting results in the disruption of a splice site in the USH2A gene at a splice acceptor site or a splice donor site associated with exon 13, exon 21, exon 25, exon 31, and exon 69.

24. The method of any one of claims 18-23, wherein the step of contacting results in the disruption of a splice acceptor site or a splice donor site associated with exon 13.

25. The method of any one of claims 18-24, wherein the step of contacting results in the skipping of exon 13 during splicing of an RNA transcript of the USH2A gene.

26. The method of any one of claims 1-25, wherein the guide RNA comprises a nucleic acid sequence that is at least 85%, at least 90%, at least 95%, at least 98%, or at least 99% identical to SEQ ID NO: 170.

27. The method of any one of claims 1-26, wherein the guide RNA comprises a first nucleic acid sequence that differs by 1, 2, 3, 4, 5, or 6 nucleotides from the nucleotide sequences of any one of any one of SEQ ID NOs: 36, 46, 47, 50, 53, 56, 57, 93, 209-213, 215-232, and 329, and a second nucleic acid sequence that differs by 1, 2, 3, 4, 5, 6, 7, 8, 9, or 10 nucleotides from the nucleotide sequence of SEQ ID NO: 170.

28. The method of any one of claims 1-27, wherein the guide RNA comprises a first nucleic acid sequence comprising any one of SEQ ID NOs: 36, 46, 47, 50, 53, 56, 57, 93, 209-213, 215-232, and 329, and a second nucleic acid sequence comprising SEQ ID NO: 170.

29. The method of any one of claims 1-28, wherein the method is performed in vivo.

30. The method of any one of claims 1-28, wherein the method is performed ex vivo.

31. The method of any one of claims 1-28, wherein the method is performed in vitro.

32. The method of any one of claims 1-29, wherein the method is performed in a subject.

33. The method of claim 32, wherein the method is performed in the inner ear of a subject.

34. The method of claim 32 or 33, wherein the subject has or is suspected of having Usher syndrome.

35. The method of any one of claims 32-34, wherein the subject is human.

36. The method of any one of claims 1-35, wherein the guide RNA comprises a first nucleic acid sequence comprising SEQ ID NO: 209 and a second nucleic acid sequence comprising SEQ ID NO: 170, wherein the base editor is ABE8e, and wherein the USH2A gene comprises a G11864A mutation.

37. The method of any one of claims 1-35, wherein the guide RNA comprises a first nucleic acid sequence comprising SEQ ID NO: 36 and a second nucleic acid sequence comprising SEQ ID NO: 170, wherein the base editor is an ABE8e, and wherein the step of contacting results in the disruption of a splice acceptor site or a splice donor site associated with exon 13.

38. A complex comprising (i) an adenosine base editor, and (ii) a guide RNA (gRNA) that comprises a nucleic acid sequence that is at least 90%, at least 95%, at least 98%, or at least 99% identical to any one of SEQ ID NOs: 12-36, 46, 47, 50, 53, 56, 57, 93, 209-213, 215-232, and 329.

39. The complex of claim 38, wherein the guide RNA comprises a nucleic acid sequence selected from the group consisting of SEQ ID NOs: 12-36, 46, 47, 50, 53, 56, 57, 93, 209-213, 215-232, and 329.

40. The complex of claim 38 or 39, wherein the guide RNA comprises a protospacer that comprises a nucleic acid sequence that is at least 90%, at least 95%, at least 98%, or at least 99% identical to any one of SEQ ID NOs: 210, 213, 214, 216, 217, 36, and 47.

41. The complex of any one of claims 38-40, wherein the base editor is ABE7.10, ABE8e, ABE8e-SaKKH, ABE8e-NG, ABE-xCas9, ABE7.10-SaKKH, ABE7.10-NG, ABE7.10-VRQR, ABE8e-NRTH, ABE8e-NRRH, or ABE8e-VRQR.

42. The complex of any one of claims 38-41, wherein the base editor comprises ABE8e.

43. The complex of claim 38, wherein the adenine base editor comprises ABE8e and the guide RNA comprises a first nucleic acid sequence of SEQ ID NO: 217 and a second nucleic acid sequence comprising SEQ ID NO: 170.

44. The complex of claim 38, wherein the adenine base editor comprises ABE8e-VRQR and the guide RNA comprises a first nucleic acid sequence of SEQ ID NO: 209 and a second nucleic acid sequence comprising SEQ ID NO: 170.

45. A method for deaminating a cytosine (C) in an USH2A gene, the method comprising contacting the USH2A gene with a cytidine base editor in association with a guide RNA (gRNA), wherein the gRNA comprises a guide sequence that is complementary to a target nucleic acid sequence in the USH2A gene, wherein the target nucleic acid sequence in the USH2A gene comprises a protospacer that comprises a nucleic acid sequence having at least 90%, at least 95%, at least 98%, or at least 99% identity to any one of of any one of SEQ ID NOs: 1-11, or a naturally-occurring variant thereof, wherein the base editor comprises a nucleic acid programmable DNA binding protein (napDNAbp) domain and a cytosine deaminase domain.

46. The method of claim 45, wherein the guide sequence comprises a protospacer that comprises a nucleic acid sequence that differs by 1, 2, 3, 4, 5, 6, 7, 8, 9, or 10 nucleotides from the nucleotide sequence of any one of SEQ ID NOs: 1-11.

47. The method of claim 45 or 46, wherein the guide sequence comprises a protospacer that comprises a nucleic acid sequence that comprises any one of SEQ ID NOs: 1-11.

48. The method of any one of claims 45-47, wherein the protospacer comprises a nucleic acid sequence comprises any one of SEQ ID NOs: 1, 2, or 7.

49. The method of any one of claims 45-47, wherein the cytosine deaminase domain comprises a member of the APOBEC family of deaminases.

50. The method of any one of claims 45-49, wherein the cytosine deaminase domain comprises an amino acid sequence having at least 90%, at least 95%, at least 98%, or at least 99% identity to any one of SEQ ID NOs: 292-326.

51. The method of any one of claims 45-50, wherein the cytosine deaminase domain comprises an amino acid sequence selected from the group consisting of SEQ ID NOs: 292-326.

52. The method of any one of claims 45-51, wherein the cytosine deaminase domain comprises the amino acid sequence of SEQ ID NO: 318.

53. The method of any one of claims 45-52, wherein the base editor is BE3, BE3.9max, BE4max, BE4-SaKKH, BE3.9-NG, BE3.9-NRRH, or BE4max-VRQR.

54. The method of any one of claims 45-53, wherein the base editor is BE4max.

55. The method of any one of claims 45-54, wherein the napDNAbp domain is a nuclease or a nickase.

56. The method of claim any one of claims 45-55, wherein the napDNAbp domain comprises a S. pyogenes Cas9 (SpCas9) or a S. aureus Cas9 (SaCas9), or a variant thereof.

57. The method of any one of claims 45-56, wherein the napDNAbp domain comprises a wild-type SpCas9, a wild-type SaCas9, a SpCas9-VRQR, a SaCas9-KKH, a SpCas9-NG, an xCas9, or a SpCas9-NRRH.

58. The method of any one of claims 45-57, wherein the napDNAbp comprises a wild-type SpCas9 or a SpCas9-VRQR.

59. The method of any one of claims 45-58, wherein the USH2A gene comprises a T1606C, an A1841G, a T2296C, an A3368G, a T4325C, an A7595G, an A8559G, a T9799C, a T10561C, or an A12067G mutation.

60. The method of any one of claims 45-59, wherein the guide RNA comprises a nucleic acid sequence that is at least 90%, at least 95%, at least 98%, or at least 99% identical to SEQ ID NOs: 37-45, 48, 49, 51, 52, 54, 55, 58-63, 93, and 198.

61. The method of any one of claims 45-60, wherein the guide RNA comprises a nucleic acid sequence selected from the group consisting of SEQ ID NOs: 37-45, 48, 49, 51, 52, 54, 55, 58-63, 93, and 198.

62. The method of any one of claims 45-61, wherein the guide RNA comprises a nucleic acid sequence that is at least 90%, at least 95%, at least 98%, or at least 99% identical to any one of SEQ ID NOs: 37, 40, and 44.

63. The method of any one of claims 45-62, wherein the guide RNA comprises a nucleic acid sequence selected from the group consisting of SEQ ID NOs: 37, 40, and 44.

64. The method of any one of claims 60-63, wherein the step of contacting results in the disruption of a splice site in the USH2A gene.

65. The method of any one of claims 60-64, wherein the step of contacting results in the disruption of a splice acceptor site or a splice donor site in the USH2A gene associated with exon 8, exon 13, exon 16, exon 17, exon 18, exon 21, exon 24, exon 28, exon 29, exon 30, exon 31, exon 32, exon 38, exon 43, exon 45, exon 50, exon 53, exon 56, exon 59, exon 62, exon 65, exon 68, exon 69, and exon 71.

66. The method of any one of claims 60-65, wherein the step of contacting results in the removal of a splice site at a splice acceptor site or a splice donor site associated with exon 16, exon 59, or exon 43.

67. The method of any one of claims 60-66, wherein the step of contacting results in the skipping of exon 16, exon 59, or exon 43 during splicing of an RNA transcript of the USH2A gene.

68. The method of any one of claims 45-67, wherein the guide RNA comprises a nucleic acid sequence that is at least 85%, at least 90%, at least 95%, at least 98%, or at least 99% identical to SEQ ID NO: 170.

69. The method of any one of claims 45-68, wherein the guide RNA comprises a first nucleic acid sequence that differs by 1, 2, 3, 4, 5, or 6 nucleotides from the nucleotide sequences of any one of any one of SEQ ID NOs: 199-209 and a second nucleic acid sequence that differs by 1, 2, 3, 4, 5, 6, 7, 8, 9, or 10 nucleotides from the nucleotide sequence of SEQ ID NO: 170.

70. The method of any one of claims 45-69, wherein the guide RNA comprises a first sequence comprising any one of SEQ ID NOs: 199-209 and a second sequence comprising SEQ ID NO: 170.

71. The method of any one of claims 45-70, wherein the method is performed in vivo.

72. The method of any one of claims 45-70, wherein the method is performed ex vivo.

73. The method of any one of claims 45-70, wherein the method is performed in vitro.

74. The method of any one of claims 45-70, wherein the method is performed in a subject.

75. The method of any one of claims 45-74, wherein the guide RNA comprises a first nucleic acid sequence comprising SEQ ID NO: 199 and a second nucleic acid sequence comprising SEQ ID NO: 170, wherein the base editor is BE4max, and wherein the USH2A gene comprises an A7595G mutation.

76. The method of any one of claims 1-37 and 45-75, wherein the step of contacting results in a sequence that is not associated with Usher syndrome.

77. The method of any one of claims 1-37 and 45-76, wherein the step of contacting leads to an increase in full-length Usherin protein.

78. The method of any one of claims 1-37 and 45-77, wherein the step of contacting partially or completely restores Usherin protein stability or function.

79. The method of any one of claims 1-37 and 45-78, wherein deaminating an adenosine or cytosine nucleobase in the USH2A gene partially or completely reverses visual or hearing loss.

80. A complex comprising (i) an cytidine base editor, and (ii) a guide RNA (gRNA) comprising a nucleic acid sequence that is at least 90%, at least 95%, at least 98%, or at least 99% identical to any one of SEQ ID NOs: 1-11, 37-45, 48, 49, 51, 52, 54, 55, 58-63, 93, and 198-209.

81. The complex of claim 80, wherein the guide RNA comprises a nucleic acid sequence selected from the group consisting of SEQ ID NOs: 1-11, 37-45, 48, 49, 51, 52, 54, 55, 58-63, 93, and 198-209.

82. The complex of claim 80 or 81, wherein the guide RNA comprises a nucleic acid sequence that is at least 90%, at least 95%, at least 98%, or at least 99% identical to any one of SEQ ID NOs: 199, 200, 205, 37, 40, and 44.

83. The complex of any one of claims 80-82, wherein the gRNA comprises a nucleic acid sequence selected from the group consisting of SEQ ID NOs: 199, 200, 205, 37, 40, and 44.

84. The complex of any one of claims 80-83, wherein the cytidine base editor is BE4max or BE4max-VRQR.

85. The complex of any one of claims 80-84, wherein the cytidine base editor comprises BE4max, and the gRNA comprises the nucleic acid sequence of SEQ ID NO: 199.

86. The complex of any one of claims 80-84, wherein the cytidine base editor comprises BE4max, and the gRNA comprises the nucleic acid sequence of SEQ ID NO: 40.

87. The complex of any one of claims 80-85, wherein the cytidine base editor comprises BE4max and the guide RNA comprises a first nucleic acid sequence of SEQ ID NO: 199 and a second nucleic acid sequence comprising SEQ ID NO: 170.

88. A pharmaceutical composition comprising the complex of any one of claims 38-44 and 80-87 further comprising a pharmaceutically acceptable excipient.

89. The pharmaceutical composition of claim 87 further comprising a cationic lipid or cationic polymer.

90. A vector comprising one or more polynucleotides encoding the complex of any one of claims 38-44 and 80-87.

91. The vector of claim 90, wherein the vector comprises a heterologous promoter driving expression of the gRNA.

92. The vector of claim 90 or 91, wherein the vector is a recombinant adeno-associated viral (rAAV) vector.

93. The vector of claim 92, wherein the rAAV vector is formulated for delivery to the retina or the inner ear of the subject by injection.

94. The vector of claim 93, wherein the rAAV vector is formulated for delivery by subretinal injection.

95. A cell comprising the complex of any one of claims 38-44 and 80-87, or the vector of any one of claims 90-94.

96. A method of treatment of a subject in need thereof comprising administering the complex of any one of claims 38-44 and 80-87, the vector of any one of claims 90-94, or the cell of claim 95 to the subject.

97. The method of claim 96, wherein the step of adminstering comprises a subretinal injection or injection into the inner ear.

98. The method of claim 96 or 97, wherein the subject is suffering from Usher syndrome or retinitis pigmentosa.

99. A kit comprising
(i) the vector of any one of claims 90-94; and
(ii) an expression construct encoding a guide RNA backbone, wherein the construct comprises a cloning site positioned to allow the cloning of a nucleic acid sequence identical or complementary to a target sequence into the guide RNA backbone.

100. Use of a complex of any one of claims 38-44 and 80-87, the pharmaceutical composition of any one of claims 87-89, or the cell of claim 95, as a medicament.

101. The use of claim 100, wherein the medicament is for treatment of Usher syndrome.

102. The use of claim 100, wherein the medicament is for treatment of autosomal recessive retinitis pigmentosa or of hearing loss.

103. A composition comprising:
(i) a first recombinant adeno associated virus (rAAV) particle comprising a first nucleotide sequence encoding a N-terminal portion of a base editor in accordance with the complex of any one of claims 38-44 and 80-87 fused at its C-terminus to an intein-N; and
(ii) a second recombinant adeno associated virus (rAAV) particle comprising a second nucleotide sequence encoding an intein-C fused to the N-terminus of a C-terminal portion of the base editor,
wherein at least one of the first nucleotide sequence and second nucleotide sequence is operably linked to a first promoter,
wherein at least one of the first nucleotide sequence and second nucleotide sequence comprises at its 3′ end a gRNA nucleic acid segment encoding a guide RNA in accordance with the complex of any one of claims 38-44 and 80-87 operably linked to a second promoter, and
wherein the direction of transcription of the guide RNA nucleic acid segment is reversed relative to the direction of transcription of the at least one nucleotide sequence.

104. The composition of claim 103, wherein the first rAAV particle and/or the second rAAV particle is an rAAV2 particle, rAAV6 particle, rAAV8 particle, rPHP.B particle, rPHP.eB particle, or rAAV9 particle, or a variant thereof.

105. The composition of claim 103 or 104, wherein the first rAAV particle and/or the second rAAV particle is an rAAV9 particle.

106. The composition of any one of claims 103-105, wherein the N-terminal portion of the base editor comprises a portion of any one of SEQ ID NOs: 350-388 that corresponds to amino acids 1-573 of the napDNAbp domain of the base editor.

107. The composition of any one of claims 103-106, wherein the C-terminal portion of the base editor comprises a portion of any one of SEQ ID NOs: 350-388 that corresponds to amino acids 574-1368 of the napDNAbp domain of the base editor.

108. A composition comprising a guide RNA that comprises a first nucleic acid sequence that differs by 1, 2, 3, 4, 5, or 6 nucleotides from the nucleotide sequences of any one of any one of SEQ ID NOs: 36-63, 198-232, and 329, and a second nucleic acid sequence that differs by 1, 2, 3, 4, 5, 6, 7, 8, 9, or 10 nucleotides from the nucleotide sequence of SEQ ID NO: 170.

109. The composition of claim 108, wherein the guide RNA comprises a first nucleic acid sequence comprising any one of SEQ ID NOs: 36-63, 198-232, and 329, and a second nucleic acid sequence comprising SEQ ID NO: 170.

110. The composition of claim 108 or 109, wherein the guide RNA comprises a first nucleic acid sequence comprising SEQ ID NO: 209 and a second nucleic acid sequence comprising SEQ ID NO: 170.

111. The composition of claim 108 or 109, wherein the guide RNA comprises a first nucleic acid sequence comprising SEQ ID NO: 36 and a second nucleic acid sequence comprising SEQ ID NO: 170.

112. The composition of claim 108 or 109, wherein the guide RNA comprises a first sequence comprising SEQ ID NO: 199 and a second sequence comprising SEQ ID NO: 170.

113. The composition of claim 108 or 109, wherein the guide RNA comprises a first nucleic acid sequence of SEQ ID NO: 217 and a second nucleic acid sequence comprising SEQ ID NO: 170.

114. The method of any one of claims 1-37, wherein the adenine base editor comprises an amino acid sequence having at least 95%, 98%, 99%, or 100% sequence identity to any one of SEQ ID NOs: 373-388.

115. The complex of any one of claims 38-44, wherein the adenine base editor comprises an amino acid sequence having at least 95%, 98%, 99%, or 100% sequence identity to any one of SEQ ID NOs: 373-388.

116. The method of any one of claims 45-79, wherein the cytidine base editor comprises an amino acid sequence having at least 95%, 98%, 99%, or 100% sequence identity to any one of SEQ ID NOs: 350-372.

117. The complex of any one of claims 80-87, wherein the cytidine base editor comprises an amino acid sequence having at least 95%, 98%, 99%, or 100% sequence identity to any one of 350-372.

118. The composition of any one of claims 103-107, wherein the base editor comprises an amino acid sequence having at least 95%, 98%, 99%, or 100% sequence identity to any one of SEQ ID NOs: 350-388.

119. The method of any one of claims 1-37, 45-79, 114, and 116, wherein the step of contacting partially or completely restores auditory function.

120. The method of any one of claims 1-37, 45-79, 114, and 116, wherein the step of contacting partially or completely restores auditory or visual function.
